(19) United States
(12) Patent Application Publication
(10) Pub. No.: US 2002/0115078 A1
(43) Pub. Date: Aug. 22, 2002

(54) Identification of polynucleotides encoding novel helicobacter polypeptides in the helicobacter genome

(76) Inventors: Harold Kleanthous, Newtonville, MA (US); Amal Al-Garawi, Boston, MA (US); Charles Miller, Medford, MA (US); Jean-Francois Tomb, Baltimore, MD (US); Raymond P. Oomen, Ontario (CA)

Correspondence Address: CLARK & ELBING LLP, 101 FEDERAL STREET, BOSTON, MA, 02110, US

(21) Appl. No.: 09/881,752

(22) Filed: Jun. 18, 2001

Related U.S. Application Data
(63) Continuation of application No. 08/833,457, filed on Apr. 1, 1997, now abandoned.

(51) Int. Cl. C12Q 1/68; C07H 21/04; A61K 39/40; A61K 39/02; A61K 48/00; C12N 15/74

(52) U.S. Cl. 435/6; 424/190.1; 514/44; 424/164.1; 536/23.7; 435/320.1

(57) ABSTRACT

The invention provides Helicobacter polypeptides that can be used in vaccination methods for preventing or treating Helicobacter infection, and polynucleotides that encode these polypeptides.

### PRIORITY INFORMATION

[0001] This application is a continuation of, and claims priority from, U.S. Ser. No. 08/833,457, filed on Apr. 1, 1997, which is incorporated by reference herein in its entirety.

### FIELD OF THE INVENTION

[0002] The invention relates to Helicobacter antigens and corresponding polynucleotide molecules that can be used in methods to prevent or treat Helicobacter infection in mammals, such as humans.

### BACKGROUND OF THE INVENTION

[0003] Helicobacter is a genus of spiral, gram-negative bacteria that colonize the gastrointestinal tracts of mammals. Several species colonize the stomach, most notably H. pylon, H. heilmanii, H. felis, and H. mustelae. Although H. pylori is the species most commonly associated with human infection, H. heilmanii and H. felis have also been isolated from humans, but at lower frequencies than H. pylon. Helicobacter infects over 50% of adult populations in developed countries and nearly 100% in developing countries and some Pacific rim countries, making it one of the most prevalent infections worldwide.

[0004] Helicobacter is routinely recovered from gastric biopsies of humans with histological evidence of gastritis and peptic ulceration. Indeed, H. pylon is now recognized as an important pathogen of humans, in that the chronic gastritis it causes is a risk factor for the development of peptic ulcer diseases and gastric carcinoma. It is thus highly desirable to develop safe and effective vaccines for preventing and treating Helicobacter infection.

[0005] A number of Helicobacter antigens have been characterized or isolated. These include urease, which is composed of two structural subunits of approximately 30 and 67 kDa (Hu et al., Infect. Immun. 58:992, 1990; Dunn et al., J. Biol. Chem. 265:9464, 1990; Evans et al., Microbial Pathogenesis 10:15, 1991; Labigne et al., J. Bact., 173:1920, 1991); the 87 kDa vacuolar cytotoxin (VacA) (Cover et al., J. Biol. Chem. 267:10570, 1992; Phadnis et al., Infect. Immun. 62:1557, 1994; WO 93/18150); a 128 kDa immunodominant antigen associated with the cytotoxin (CagA, also called TagA; WO 93/18150; U.S. Pat. No. 5,403,924); 13 and 58 kDa heat shock proteins HspA and HspB (Suerbaum et al., Mol. Microbiol. 14:959, 1994; WO 93/18150); a 54 kDa catalase (Hazell et al., J. Gen. Microbiol. 137:57, 1991); a 15 kDa histidine-rich protein (Hpn) (Gilbert et al., Infect. Immun. 63:2682, 1995); a 20 kDa membrane-associated lipoprotein (Kostrcynska et al., J. Bact. 176:5938, 1994); a 30 kDa outer membrane protein (Bölin et al., J. Clin. Microbiol. 33:381, 1995); a lactoferrin receptor (FR 2,724,936); and several porins, designated HopA, HopB, HopC, HopD, and HopE, which have molecular weights of 48-67 kDa (Exner et al., Infect. Immun. 63:1567, 1995; Doig et al., J. Bact. 177:5447, 1995). Some of these proteins have been proposed as potential vaccine antigens. In particular, urease is believed to be a vaccine candidate (WO 94/9823; WO 95/22987; WO 95/3824; μMichetti et al., Gastroenterology 107:1002, 1994). Nevertheless, it is thought that several antigens may ultimately be necessary in a vaccine.

### SUMMARY OF THE INVENTION

[0006] The invention provides polynucleotide molecules that encode Helicobacter polypeptides, designated GHPO 35 (SEQ ID NO:2), GHPO 55 (SEQ ID NO:4), GHPO 78 (SEQ ID NO:6), GHPO 89 (SEQ ID NO:8), GHPO 129 (SEQ ID NO:10), GHPO 541 (SEQ ID NO:12), GHPO 607 (SEQ ID NO:14), GHPO 635 (SEQ ID NO:16), GHPO 701 (SEQ ID NO:18), GHPO 712 (SEQ ID NO:20), GHPO 761 (SEQ ID NO:22), GHPO 838 (SEQ ID NO:24), GHPO 1034 (SEQ ID NO:26), GHPO 1085 (SEQ ID NO:28), GHPO 1213 (SEQ ID NO:30), GHPO 1255 (SEQ ID NO:32), GHPO 1308 (SEQ ID NO:34), GHPO 1389 (SEQ ID NO:36), GHPO 1706 (SEQ ID NO:38), GHPO 234 (SEQ ID NO:40), GHPO 314 (SEQ ID NO:42), GHPO 510 (SEQ ID NO:44), GHPO 603 (SEQ ID NO:46), GHPO 937 (SEQ ID NO:48), GHPO 1027 (SEQ ID NO:50), GHPO 1099 (SEQ ID NO:52), GHPO 1151 (SEQ ID NO:54), GHPO 1275 (SEQ ID NO:56), GHPO 1365 (SEQ ID NO:58), GHPO 1578 (SEQ ID NO:60), GHPO 22 (SEQ ID NO:62), GHPO 58 (SEQ ID NO:64), GHPO 200 (SEQ ID NO:66), GHPO 558 (SEQ ID NO:68), GHPO 563 (SEQ ID NO:70), GHPO 695 (SEQ ID NO:72), GHPO 699 (SEQ ID NO:74), GHPO 702 (SEQ ID NO:76), GHPO 709 (SEQ ID NO:78), GHPO 741 (SEQ ID NO:80), GHPO 762 (SEQ ID NO:82), GHPO 827 (SEQ ID NO:84), GHPO 852 (SEQ ID NO:86), GHPO 1013 (SEQ ID NO:88), GHPO 1020 (SEQ ID NO:90), GHPO 1031 (SEQ ID NO:92), GHPO 1052 (SEQ ID NO:94), GHPO 1127 (SEQ ID NO:96), GHPO 1149 (SEQ ID NO:98), GHPO 1176 (SEQ ID NO:100), GHPO 1250 (SEQ ID NO:102), GHPO 1312 (SEQ ID NO:104), GHPO 1358 (SEQ ID NO:106), GHPO 1490 (SEQ ID NO:108), GHPO 1559 (SEQ ID NO:110), GHPO 1651 (SEQ ID NO:112), GHPO 1726 (SEQ ID NO:114), GHPO 1780 (SEQ ID NO:116), GHPO 895 (SEQ ID NO:118), GHPO 1447 (SEQ ID NO:120), GHPO 28 (SEQ ID NO:122), GPO 86 (SEQ ID NO:124), GHPO 155 (SEQ ID NO:126), GHPO 157 (SEQ ID NO:128), GHPO 237 (SEQ ID NO:130), GHPO 290 (SEQ ID NO:132), GHPO 293 (SEQ ID NO:134), GHPO 335 (SEQ ID NO:136), GHPO 374 (SEQ ID NO:138), GHPO 442 (SEQ ID NO:140), GHPO 480 (SEQ ID NO:142), GHPO 523 (SEQ ID NO:144), GHPO 610 (SEQ ID NO:146), GHPO 675 (SEQ ID NO:148), GHPO 690 (SEQ ID NO:150), GHPO 829 (SEQ ID NO:152), GHPO 850 (SEQ ID NO:154), GHPO 876 (SEQ ID NO:156), GHPO 984 (SEQ ID NO:158), GHPO 989 (SEQ ID NO:160), GHPO 1111 (SEQ ID NO:162), GHPO 1145 (SEQ ID NO:164), GHPO 1256 (SEQ ID NO:166), GHPO 1264 (SEQ ID NO:168), GHPO 1316 (SEQ ID NO:170), GHPO 1368 (SEQ ID NO:172), GHPO 1442 (SEQ ID NO:174), GHPO 1506 (SEQ ID NO:176), GHPO 1543 (SEQ ID NO:178), GHPO 1574 (SEQ ID NO:180), GHPO 1627 (SEQ ID NO:182), GHPO 1657 (SEQ ID NO:184), GHPO 1664 (SEQ ID NO:186), GHPO 1694 (SEQ ID NO:188), GHPO 1704 (SEQ ID NO:190), GHPO 1763 (SEQ ID NO:192), GHPO 616 (SEQ ID NO:194), GHPO 76 (SEQ ID NO:196), GHPO 109 (SEQ ID NO:198), GHPO 163 (SEQ ID NO:200), GHPO 169 (SEQ ID NO:202), GHPO 208 (SEQ ID NO:204), GHPO 219 (SEQ ID NO:206), GHPO 445 (SEQ ID NO:208), GHPO 479 (SEQ ID NO:210), GHPO 525 (SEQ ID NO:212), GHPO 535 (SEQ ID NO:214), GHPO 731 (SEQ ID NO:216), GHPO 836 (SEQ ID NO:218), GHPO 879 (SEQ ID NO:220), GHPO 881 (SEQ ID NO:222), GHPO 886 (SEQ ID NO:224), GHPO 893 (SEQ ID NO:226), GHPO 894 (SEQ ID NO:228), GHPO 976 (SEQ ID NO:230), GHPO 1011 (SEQ ID NO:232), GHPO 1024 (SEQ ID NO:234), GHPO 1084 (SEQ ID NO:236), GHPO 1329 (SEQ ID NO:238), GHPO 1330 (SEQ ID NO:240), GHPO 1346 (SEQ ID NO:242), GHPO 1360 (SEQ ID NO:244), GHPO 1388 (SEQ ID NO:246), GHPO 1411 (SEQ ID NO:248), GHPO 1419 (SEQ ID NO:250), GHPO 1446 (SEQ ID NO:252), GHPO 1469 (SEQ ID NO:254), GHPO 1501 (SEQ ID NO:256), GHPO 1505 (SEQ ID NO:258), GHPO 1522 (SEQ ID NO:260), GHPO 1525 (SEQ ID NO:262), GHPO 1615 (SEQ ID NO:264), GHPO 1689 (SEQ ID NO:266), GHPO 1733 (SEQ ID NO:268), GHPO 18 (SEQ ID NO:270), GHPO 139 (SEQ ID NO:272), GHPO 142 (SEQ ID NO:274), GHPO 250 (SEQ ID NO:276), GHPO 257 (SEQ ID NO:278), GHPO 325 (SEQ ID NO:280), GHPO 355 (SEQ ID NO:282), GHPO 357 (SEQ ID NO:284), GHPO 454 (SEQ ID NO:286), GHPO 475 (SEQ ID NO:288), GHPO 515 (SEQ ID NO:290), GHPO 527 (SEQ ID NO:292), GHPO 551 (SEQ ID NO:294), GHPO 602 (SEQ ID NO:296), GHPO 626 (SEQ ID NO:298), GHPO 646 (SEQ ID NO:300), GHPO 653 (SEQ ID NO:302), GHPO 655 (SEQ ID NO:304), GHPO 670 (SEQ ID NO:306), GHPO 739 (SEQ ID NO:308), GHPO 798 (SEQ ID NO:310), GHPO 1102 (SEQ ID NO:312), GHPO 1114 (SEQ ID NO:314), GHPO 1152 (SEQ ID NO:316), GHPO 1272 (SEQ ID NO:318), GHPO 1345 (SEQ ID NO:320), GHPO 1377 (SEQ ID NO:322), GHPO 1424 (SEQ ID NO:324), GHPO 1430 (SEQ ID NO:326), GHPO 1502 (SEQ ID NO:328), GHPO 1600 (SEQ ID NO:330), GHPO 1714 (SEQ ID NO:332), GHPO 359 (SEQ ID NO:334), GHPO 678 (SEQ ID NO:336), GHPO 708 (SEQ ID NO:338), GHPO 759 (SEQ ID NO:340), GHPO 847 (SEQ ID NO:342), GHPO 1050 (SEQ ID NO:344), GHPO 1101 (SEQ ID NO:346), GHPO 1120 (SEQ ID NO:348), GHPO 1138 (SEQ ID NO:350), GHPO 1310 (SEQ ID NO:352), GHPO 1320 (SEQ ID NO:354), GHPO 1375 (SEQ ID NO:356), GHPO 1432 (SEQ ID NO:358), GHPO 21 (SEQ ID NO:360), GHPO 282 (SEQ ID NO:362), GHPO 1089 (SEQ ID NO:364), GHPO 1141 (SEQ ID NO:366), GHPO 1280 (SEQ ID NO:368), and GHPO 1608 (SEQ ID NO:370), which can be used, e.g., in methods to prevent, treat, or diagnose Helicobacter infection. The polypeptides of the invention include those having the amino acid sequences shown in the sequence listing, as well as mature forms of proteins having sequences shown in the sequence listing in their unprocessed forms, and fragments thereof. Those skilled in the art will understand that the invention also includes polynucleotide molecules that encode mutants and derivatives of these polypeptides, which can result from the addition, deletion, or substitution of non-essential amino acids, as is described further below.

[0007] In addition to the polynucleotide molecules described above, the invention includes the corresponding polypeptides (i.e., polypeptides encoded by the polynucleotide molecules of the invention, or fragments thereof), and monospecific antibodies that specifically bind to these polypeptides.

[0008] The present invention has many applications and includes expression cassettes, vectors, and cells transformed or transfected with the polynucleotides of the invention. Accordingly, the present invention provides (i) methods for producing polypeptides of the invention in recombinant host systems and related expression cassettes, vectors, and transformed or transfected cells; (ii) live vaccine vectors, such as pox virus, Salmonella typhimurium, and Vibrio cholerae vectors, that contain polynucleotides of the invention (such vaccine vectors being useful in, e.g., methods for preventing or treating Helicobacter infection) in combination with a diluent or carrier, and related pharmaceutical compositions and associated therapeutic and/or prophylactic methods; (iii) therapeutic and/or prophylactic methods involving administration of polynucleotide molecules, either in a naked form or formulated with a delivery vehicle, polypeptides or mixtures of polypeptides, or monospecific antibodies of the invention, and related pharmaceutical compositions; (iv) methods for detecting the presence of Helicobacter in biological samples, which can involve the use of polynucleotide molecules, monospecific antibodies, or polypeptides of the invention; and (v) methods for purifying polypeptides of the invention by antibody-based affinity chromatography.

### DETAILED DESCRIPTION

[0009] Open reading frames (ORFs) encoding new polypeptides, designated GHPO 35 (SEQ ID NO:2), GHPO 55 (SEQ ID NO:4), GHPO 78 (SEQ ID NO:6), GHPO 89 (SEQ ID NO:8), GHPO 129 (SEQ ID NO:10), GHPO 541 (SEQ ID NO:12), GHPO 607 (SEQ ID NO:14), GHPO 635 (SEQ ID NO:16), GHPO 701 (SEQ ID NO:18), GHPO 712 (SEQ ID NO:20), GHPO 761 (SEQ ID NO:22), GHPO 838 (SEQ ID NO:24), GHPO 1034 (SEQ ID NO:26), GHPO 1085 (SEQ ID NO:28), GHPO 1213 (SEQ ID NO:30), GHPO 1255 (SEQ ID NO:32), GHPO 1308 (SEQ ID NO:34), GHPO 1389 (SEQ ID NO:36), GHPO 1706 (SEQ ID NO:38), GHPO 234 (SEQ ID NO:40), GHPO 314 (SEQ ID NO:42), GHPO 510 (SEQ ID NO:44), GHPO 603 (SEQ ID NO:46), GHPO 937 (SEQ ID NO:48), GHPO 1027 (SEQ ID NO:50), GHPO 1099 (SEQ ID NO:52), GHPO 1151 (SEQ ID NO:54), GHPO 1275 (SEQ ID NO:56), GHPO 1365 (SEQ ID NO:58), GHPO 1578 (SEQ ID NO:60), GHPO 22 (SEQ ID NO:62), GHPO 58 (SEQ ID NO:64), GHPO 200 (SEQ ID NO:66), GHPO 558 (SEQ ID NO:68), GHPO 563 (SEQ ID NO:70), GHPO 695 (SEQ ID NO:72), GHPO 699 (SEQ ID NO:74), GHPO 702 (SEQ ID NO:76), GHPO 709 (SEQ ID NO:78), GHPO 741 (SEQ ID NO:80), GHPO 762 (SEQ ID NO:82), GHPO 827 (SEQ ID NO:84), GHPO 852 (SEQ ID NO:86), GHPO 1013 (SEQ ID NO:88), GHPO 1020 (SEQ ID NO:90), GHPO 1031 (SEQ ID NO:92), GHPO 1052 (SEQ ID NO:94), GHPO 1127 (SEQ ID NO:96), GHPO 1149 (SEQ ID NO:98), GHPO 1176 (SEQ ID NO:100), GHPO 1250 (SEQ ID NO:102), GHPO 1312 (SEQ ID NO:104), GHPO 1358 (SEQ ID NO:106), GHPO 1490 (SEQ ID NO:108), GHPO 1559 (SEQ ID NO:110), GHPO 1651 (SEQ ID NO:112), GHPO 1726 (SEQ ID NO:114), GHPO 1780 (SEQ ID NO:116), GHPO 895 (SEQ ID NO:118), GHPO 1447 (SEQ ID NO:120), GHPO 28 (SEQ ID NO:122), GHPO 86 (SEQ ID NO:124), GHPO 155 (SEQ ID NO:126), GHPO 157 (SEQ ID NO:128), GHPO 237 (SEQ ID NO:130), GHPO 290 (SEQ ID NO:132), GHPO 293 (SEQ ID NO:134), GHPO 335 (SEQ ID NO:136), GHPO 374 (SEQ ID NO:138), GHPO 442 (SEQ ID NO:140), GHPO 480 (SEQ ID NO:142), GHPO 523 (SEQ ID NO:144), GHPO 610 (SEQ ID NO:146), GHPO 675 (SEQ ID NO:148), GHPO 690 (SEQ ID NO:150), GHPO 829 (SEQ ID NO:152), GHPO 850 (SEQ ID NO:154), GHPO 876 (SEQ ID NO:156), GHPO 984 (SEQ ID NO:158), GHPO 989 (SEQ ID NO:160), GHPO 1111 (SEQ ID NO:162), GHPO 1145 (SEQ ID NO:164), GHPO 1256 (SEQ ID NO:166), GHPO 1264 (SEQ ID NO:168), GHPO 1316 (SEQ ID NO:170), GHPO 1368 (SEQ ID NO:172), GHPO 1442 (SEQ ID NO:174), GHPO 1506 (SEQ ID NO:176), GHPO 1543 (SEQ ID NO:178), GHPO 1574 (SEQ ID NO:180), GHPO 1627 (SEQ ID NO:182), GHPO 1657 (SEQ ID NO:184), GHPO 1664 (SEQ ID NO:186), GHPO 1694 (SEQ ID NO:188), GHPO 1704 (SEQ ID NO:190), GHPO 1763 (SEQ ID NO:192), GHPO 616 (SEQ ID NO:194), GHPO 76 (SEQ ID NO:196), GHPO 109 (SEQ ID NO:198), GHPO 163 (SEQ ID NO:200), GHPO 169 (SEQ ID NO:202), GHPO 208 (SEQ ID NO:204), GHPO 219 (SEQ ID NO:206), GHPO 445 (SEQ ID NO:208), GHPO 479 (SEQ ID NO:210), GHPO 525 (SEQ ID NO:212), GHPO 535 (SEQ ID NO:214), GHPO 731 (SEQ ID NO:216), GHPO 836 (SEQ ID NO:218), GHPO 879 (SEQ ID NO:220), GHPO 881 (SEQ ID NO:222), GHPO 886 (SEQ ID NO:224), GHPO 893 (SEQ ID NO:226), GHPO 894 (SEQ ID NO:228), GHPO 976 (SEQ ID NO:230), GHPO 1011 (SEQ ID NO:232), GHPO 1024 (SEQ ID NO:234), GHPO 1084 (SEQ ID NO:236), GHPO 1329 (SEQ ID NO:238), GHPO 1330 (SEQ ID NO:240), GHPO 1346 (SEQ ID NO:242), GHPO 1360 (SEQ ID NO:244), GHPO 1388 (SEQ ID NO:246), GHPO 1411 (SEQ ID NO:248), GHPO 1419 (SEQ ID NO:250), GHPO 1446 (SEQ ID NO:252), GHPO 1469 (SEQ ID NO:254), GHPO 1501 (SEQ ID NO:256), GHPO 1505 (SEQ ID NO:258), GHPO 1522 (SEQ ID NO:260), GHPO 1525 (SEQ ID NO:262), GHPO 1615 (SEQ ID NO:264), GHPO 1689 (SEQ ID NO:266), GHPO 1733 (SEQ ID NO:268), GHPO 18 (SEQ ID NO:270), GHPO 139 (SEQ ID NO:272), GHPO 142 (SEQ ID NO:274), GHPO 250 (SEQ ID NO:276), GHPO 257 (SEQ ID NO:278), GHPO 325 (SEQ ID NO:280), GHPO 355 (SEQ ID NO:282), GHPO 357 (SEQ ID NO:284), GHPO 454 (SEQ ID NO:286), GHPO 475 (SEQ ID NO:288), GHPO 515 (SEQ ID NO:290), GHPO 527 (SEQ ID NO:292), GHPO 551 (SEQ ID NO:294), GHPO 602 (SEQ ID NO:296), GHPO 626 (SEQ ID NO:298), GHPO 646 (SEQ ID NO:300), GHPO 653 (SEQ ID NO:302), GHPO 655 (SEQ ID NO:304), GHPO 670 (SEQ ID NO:306), GHPO 739 (SEQ ID NO:308), GHPO 798 (SEQ ID NO:310), GHPO 1102 (SEQ ID NO:312), GHPO 1114 (SEQ ID NO:314), GHPO 1152 (SEQ ID NO:316), GHPO 1272 (SEQ ID NO:318), GHPO 1345 (SEQ ID NO:320), GHPO 1377 (SEQ ID NO:322), GHPO 1424 (SEQ ID NO:324), GHPO 1430 (SEQ ID NO:326), GHPO 1502 (SEQ ID NO:328), GHPO 1600 (SEQ ID NO:330), GHPO 1714 (SEQ ID NO:332), GHPO 359 (SEQ ID NO:334), GHPO 678 (SEQ ID NO:336), GHPO 708 (SEQ ID NO:338), GHPO 759 (SEQ ID NO:340), GHPO 847 (SEQ ID NO:342), GHPO 1050 (SEQ ID NO:344), GHPO 1101 (SEQ ID NO:346), GHPO 1120 (SEQ ID NO:348), GHPO 1138 (SEQ ID NO:350), GHPO 1310 (SEQ ID NO:352), GHPO 1320 (SEQ ID NO:354), GHPO 1375 (SEQ ID NO:356), GHPO 1432 (SEQ ID NO:358), GHPO 21 (SEQ ID NO:360), GHPO 282 (SEQ ID NO:362), GHPO 1089 (SEQ ID NO:364), GHPO 1141 (SEQ ID NO:366), GHPO 1280 (SEQ ID NO:368), and GHPO 1608 (SEQ ID NO:370), have been identified in the H. pylori genome. These polypeptides can be used, for example, in vaccination methods for preventing or treating Helicobacter infection. Some of the new polypeptides are secreted polypeptides that can be produced in their mature forms (i.e., as polypeptides that have been exported through class II or class 111 secretion pathways) or as precursors that include signal peptides, which can be removed in the course of excretion/secretion by cleavage at the N-terminal end of the mature form. (The cleavage site is located at the C-terminal end of the signal peptide, adjacent to the mature form.) According to a first aspect of the invention, there are provided isolated polynucleotides that encode the precursor and mature forms of the Helicobacter GHPO proteins listed above (e.g., GHPO 35 (SEQ ID NO:1), GHPO 55 (SEQ ID NO:3), GHPO 78 (SEQ ID NO:5), GHPO 89 (SEQ ID NO:7), GHPO 129 (SEQ ID NO:9), GHPO 541 (SEQ ID NO:1), GHPO 607 (SEQ ID NO:13), GHPO 635 (SEQ ID NO:15), GHPO 701 (SEQ ID NO:17), GHPO 712 (SEQ ID NO:19), GHPO 761 (SEQ ID NO:21), GHPO 838 (SEQ ID NO:23), GHPO 1034 (SEQ ID NO:25), GHPO 1085 (SEQ ID NO:27), GHPO 1213 (SEQ ID NO:29), GHPO 1255 (SEQ ID NO:31), GHPO 1308 (SEQ ID NO:33), GHPO 1389 (SEQ ID NO:35), GHPO 1706 (SEQ ID NO:37), GHPO 234 (SEQ ID NO:39), GHPO 314 (SEQ ID NO:41), GHPO 510 (SEQ ID NO:43), GHPO 603 (SEQ ID NO:45), GHPO 937 (SEQ ID NO:47), GHPO 1027 (SEQ ID NO:49), GHPO 1099 (SEQ ID NO:51), GHPO 1151 (SEQ ID NO:53), GHPO 1275 (SEQ ID NO:55), GHPO 1365 (SEQ ID NO:57), GHPO 1578 (SEQ ID NO:59), GHPO 22 (SEQ ID NO:61), GHPO 58 (SEQ ID NO:63), GHPO 200 (SEQ ID NO:65), GHPO 558 (SEQ ID NO:67), GHPO 563 (SEQ ID NO:69), GHPO 695 (SEQ ID NO:71), GHPO 699 (SEQ ID NO:73), GHPO 702 (SEQ ID NO:75), GHPO 709 (SEQ ID NO:77), GHPO 741 (SEQ ID NO:79), GHPO 762 (SEQ ID NO:81), GHPO 827 (SEQ ID NO:83), GHPO 852 (SEQ ID NO:85), GHPO 1013 (SEQ ID NO:87), GHPO 1020 (SEQ ID NO:89), GHPO 1031 (SEQ ID NO:91), GHPO 1052 (SEQ ID NO:93), GHPO 1127 (SEQ ID NO:95), GHPO 1149 (SEQ ID NO:97), GHPO 1176 (SEQ ID NO:99), GHPO 1250 (SEQ ID NO:101), GHPO 1312 (SEQ ID NO:103), GHPO 1358 (SEQ ID NO:105), GHPO 1490 (SEQ ID NO:107), GHPO 1559 (SEQ ID NO:109), GHPO 1651 (SEQ ID NO:111), GHPO 1726 (SEQ ID NO:113), GHPO 1780 (SEQ ID NO:115), GHPO 895 (SEQ ID NO:117), GHPO 1447 (SEQ ID NO:119), GHPO 28 (SEQ ID NO:121), GHPO 86 (SEQ ID NO:123), GHPO 155 (SEQ ID NO:125), GHPO 157 (SEQ ID NO:127), GHPO 237 (SEQ ID NO:129), GHPO 290 (SEQ ID NO:131), GHPO 293 (SEQ ID NO:133), GHPO 335 (SEQ ID NO:135), GHPO 374 (SEQ ID NO:137), GHPO 442 (SEQ ID NO:139), GHPO 480 (SEQ ID NO:141), GHPO 523 (SEQ ID NO:143), GHPO 610 (SEQ ID NO:145), GHPO 675 (SEQ ID NO:147), GHPO 690 (SEQ ID NO:149), GHPO 829 (SEQ ID NO:151), GHPO 850 (SEQ ID NO:153), GHPO 876 (SEQ ID NO:155), GHPO 984 (SEQ ID NO:157), GHPO 989 (SEQ ID NO:159), GHPO 1111 (SEQ ID NO:161), GHPO 1145 (SEQ ID NO:163), GHPO 1256 (SEQ ID NO:165), GHPO 1264 (SEQ ID NO:167), GHPO 1316 (SEQ ID NO:169), GHPO 1368 (SEQ ID NO:171), GHPO 1442 (SEQ ID NO:173), GHPO 1506 (SEQ ID NO:175), GHPO 1543 (SEQ ID NO:177), GHPO 1574 (SEQ ID NO:179), GHPO 1627 (SEQ ID NO:181), GHPO 1657 (SEQ ID NO:183), GHPO 1664 (SEQ ID NO:185), GHPO 1694 (SEQ ID NO:187), GHPO 1704 (SEQ ID NO:189), GHPO 1763 (SEQ ID NO:191), GHPO 616 (SEQ ID NO:193), GHPO 76 (SEQ ID NO:195), GHPO 109 (SEQ ID NO:197), GHPO 163 (SEQ ID NO:199), GHPO 169 (SEQ ID NO:201), GHPO 208 (SEQ ID NO:203), GHPO 219 (SEQ ID NO:205), GHPO 445 (SEQ ID NO:207), GHPO 479 (SEQ ID NO:209), GHPO 525 (SEQ ID NO:211), GHPO 535 (SEQ ID NO:213), GHPO 731 (SEQ ID NO:215), GHPO 836 (SEQ ID NO:217), GHPO 879 (SEQ ID NO:219), GHPO 881 (SEQ ID NO:221), GHPO 886 (SEQ ID NO:223), GHPO 893 (SEQ ID NO:225), GHPO 894 (SEQ ID NO:227), GHPO 976 (SEQ ID NO:229), GHPO 1011 (SEQ ID NO:231), GHPO 1024 (SEQ ID NO:233), GHPO 1084 (SEQ ID NO:235), GHPO 1329 (SEQ ID NO:237), GHPO 1330 (SEQ ID NO:239), GHPO 1346 (SEQ ID NO:241), GHPO 1360 (SEQ ID NO:243), GHPO 1388 (SEQ ID NO:245), GHPO 1411 (SEQ ID NO:247), GHPO 1419 (SEQ ID NO:249), GHPO 1446 (SEQ ID NO:251), GHPO 1469 (SEQ ID NO:253), GHPO 1501 (SEQ ID NO:255), GHPO 1505 (SEQ ID NO:257), GHPO 1522 (SEQ ID NO:259), GHPO 1525 (SEQ ID NO:261), GHPO 1615 (SEQ ID NO:263), GHPO 1689 (SEQ ID NO:265), GHPO 1733 (SEQ ID NO:267), GHPO 18 (SEQ ID NO:269), GHPO 139 (SEQ ID NO:271), GHPO 142 (SEQ ID NO:273), GHPO 250 (SEQ ID NO:275), GHPO 257 (SEQ ID NO:277), GHPO 325 (SEQ ID NO:279), GHPO 355 (SEQ ID NO:281), GHPO 357 (SEQ ID NO:283), GHPO 454 (SEQ ID NO:285), GHPO 475 (SEQ ID NO:287), GHPO 515 (SEQ ID NO:289), GHPO 527 (SEQ ID NO:291), GHPO 551 (SEQ ID NO:293), GHPO 602 (SEQ ID NO:295), GHPO 626 (SEQ ID NO:297), GHPO 646 (SEQ ID NO:299), GHPO 653 (SEQ ID NO:301), GHPO 655 (SEQ ID NO:303), GHPO 670 (SEQ ID NO:305), GHPO 739 (SEQ ID NO:307), GHPO 798 (SEQ ID NO:309), GHPO 1102 (SEQ ID NO:311), GHPO 1114 (SEQ ID NO:313), GHPO 1152 (SEQ ID NO:315), GHPO 1272 (SEQ ID NO:317), GHPO 1345 (SEQ ID NO:319), GHPO 1377 (SEQ ID NO:321), GHPO 1424 (SEQ ID NO:323), GHPO 1430 (SEQ ID NO:325), GHPO 1502 (SEQ ID NO:327), GHPO 1600 (SEQ ID NO:329), GHPO 1714 (SEQ ID NO:331), GHPO 359 (SEQ ID NO:333), GHPO 678 (SEQ ID NO:335), GHPO 708 (SEQ ID NO:337), GHPO 759 (SEQ ID NO:339), GHPO 847 (SEQ ID NO:341), GHPO 1050 (SEQ ID NO:343), GHPO 1101 (SEQ ID NO:345), GHPO 1120 (SEQ ID NO:347), GHPO 1138 (SEQ ID NO:349), GHPO 1310 (SEQ ID NO:351), GHPO 1320 (SEQ ID NO:353), GHPO 1375 (SEQ ID NO:355), GHPO 1432 (SEQ ID NO:357), GHPO 21 (SEQ ID NO:359), GHPO 282 (SEQ ID NO:361), GHPO 1089 (SEQ ID NO:363), GHPO 1141 (SEQ ID NO:365), GHPO 1280 (SEQ ID NO:367), and GHPO 1608 (SEQ ID NO:369)).

[0010] An isolated polynucleotide of the invention encodes (i) a polypeptide having an amino acid sequence that is homologous to a Helicobacter amino acid sequence of a polypeptide, the Helicobacter amino acid sequence being selected from the group consisting of the amino acid sequences shown in the sequence listing, or (ii) a derivative of the polypeptide.

[0011] In addition to the full-length polypeptides encoded by the polynucleotides of the invention, as set forth above, polynucleotides included in the invention can also encode polypeptides that lack signal sequences, as well as other polypeptide or peptide fragments of the full-length polypeptides.

[0012] The term “isolated polynucleotide” is defined as a polynucleotide that is removed from the environment in which it naturally occurs. For example, a naturally-occurring DNA molecule present in the genome of a living bacteria or as part of a gene bank is not isolated, but the same molecule, separated from the remaining part of the bacterial genome, as a result of, e.g., a cloning event (amplification), is “isolated.” Typically, an isolated DNA molecule is free from DNA regions (e.g., coding regions) with which it is immediately contiguous, at the 5′ or 3′ ends, in the naturally occurring genome. Such isolated polynucleotides can be part of a vector or a composition and still be isolated, as such a vector or composition is not part of its natural environment.

[0013] A polynucleotide of the invention can consist of RNA or DNA (e.g., cDNA, genomic DNA, or synthetic DNA), or modifications or combinations of RNA or DNA. The polynucleotide can be double-stranded or single-stranded and, if single-stranded, can be the coding (sense) strand or the non-coding (anti-sense) strand. The sequences that encode polypeptides of the invention, as shown in the sequence listing, can be (a) the coding sequence as shown in any of the nucleotide sequences of the sequence listing (b) a ribonucleotide sequence derived by transcription of (a); or (c) a different coding sequence that, as a result of the redundancy or degeneracy of the genetic code, encodes the same polypeptides as the polynucleotide molecules having the sequences illustrated in any of the nucleotide sequences of the sequence listing. The polypeptide can be one that is naturally secreted or excreted by, e.g., H. felis, H. mustelae, H. heilmanii, or H. pylori.

[0014] By “polypeptide” or “protein” is meant any chain of amino acids, regardless of length or post-translational modification (e.g., glycosylation or phosphorylation). Both terms are used interchangeably in the present application.

[0015] By “homologous amino acid sequence” is meant an amino acid sequence that differs from an amino acid sequence shown in the sequence listing, or an amino acid sequence encoded by a nucleotide sequence shown in the sequence listing, by one or more non-conservative amino acid substitutions, deletions, or additions located at positions at which they do not destroy the specific antigenicity of the polypeptide. Preferably, such a sequence is at least 75%, more preferably at least 80%, and most preferably at least 90% identical to an amino acid sequence shown in the sequence listing.

[0016] Homologous amino acid sequences include sequences that are identical or substantially identical to an amino acid sequence as shown in the sequence listing. By “amino acid sequence that is substantially identical” is meant a sequence that is at least 90%, preferably at least 95%, more preferably at least 97%, and most preferably at least 99% identical to an amino acid sequence of reference and that differs from the sequence of reference, if at all, by a majority of conservative amino acid substitutions.

[0017] Conservative amino acid substitutions typically include substitutions among amino acids of the same class. These classes include, for example, amino acids having uncharged polar side chains, such as asparagine, glutamine, serine, threonine, and tyrosine; amino acids having basic side chains, such as lysine, arginine, and histidine; amino acids having acidic side chains, such as aspartic acid and glutamic acid; and amino acids having nonpolar side chains, such as glycine, alanine, valine, leucine, isoleucine, proline, phenylalanine, methionine, tryptophan, and cysteine.

[0018] Homology can be measured using sequence analysis software (e.g., Sequence Analysis Software Package of the Genetics Computer Group, University of Wisconsin Biotechnology Center, 1710 University Avenue, Madison, Wis. 53705). Similar amino acid sequences are aligned to obtain the maximum degree of homology (i.e., identity). To this end, it may be necessary to artificially introduce gaps into the sequence. Once the optimal alignment has been set up, the degree of homology (i.e., identity) is established by recording all of the positions in which the amino acids of both sequences are identical, relative to the total number of positions.

[0019] Homologous polynucleotide sequences are defined in a similar way.

[0020] Preferably, a homologous sequence is one that is at least 45%, more preferably at least 60%, and most preferably at least 85% identical to a coding sequence of any of the nucleotide sequences set forth in the sequence listing.

[0021] Polypeptides having a sequence homologous to any one of the sequences shown in the sequence listing, include naturally-occurring allelic variants, as well as mutants or any other non-naturally occurring variants that are analogous in terms of antigenicity, to a polypeptide having a sequence as shown in the sequence listing.

[0022] As is known in the art, an allelic variant is an alternate form of a polypeptide that is characterized as having a substitution, deletion, or addition of one or more amino acids that does not alter the biological function of the polypeptide. By “biological function” is meant a function of the polypeptide in the cells in which it naturally occurs, even if the function is not necessary for the growth or survival of the cells. For example, the biological function of a porin is to allow the entry into cells of compounds present in the extracellular medium. The biological function is distinct from the antigenic function. A polypeptide can have more than one biological function.

[0023] Allelic variants are very common in nature. For example, a bacterial species, e.g., H. pylori, is usually represented by a variety of strains that differ from each other by minor allelic variations. Indeed, a polypeptide that fulfills the same biological function in different strains can have an amino acid sequence that is not identical in each of the strains. Such an allelic variation can be equally reflected at the polynucleotide level.

[0024] Support for the use of allelic variants of polypeptide antigens comes from, e.g., studies of the Helicobacter urease antigen. The amino acid sequence of Helicobacter urease varies widely from species to species, yet cross-species protection occurs, indicating that the urease molecule, when used as an immunogen, is highly tolerant of amino acid variations. Even among different strains of the single species H. pylori, there are amino acid sequence variations.

[0025] For example, although the amino acid sequences of the UreA and UreB subunits of H. pylon and H. felis ureases differ from one another by 26.5% and 11.8%, respectively (Ferrero et al., Molecular Microbiology 9(2):323-333, 1993), it has been shown that H. pylon urease protects mice from H. felis infection (Michetti et al., Gastroenterology 107:1002, 1994). In addition, it has been shown that the individual structural subunits of urease, UreA and UreB, which contain distinct amino acid sequences, are both protective antigens against Helicobacter infection (Michetti et al., supra). Similarly, Cuenca et al. (Gastroenterology 110: 1770, 1996) showed that therapeutic immunization of H. mustelae-infected ferrets with H. pylori urease was effective at eradicating H. mustelae infection. Further, several urease variants have been reported to be effective vaccine antigens, including, e.g., recombinant UreA +UreB apoenzyme expressed from pORV142 (UreA and UreB sequences derived from H. pylori strain CPM630; Lee et al., J. Infect. Dis.172:161, 1995); recombinant UreA+UreB apoenzyme expressed from pORV214 (UreA and UreB sequences differ from H. pylori strain CPM630 by one and two amino acid changes, respectively; Lee et al., supra, 1995); a UreA-glutathione-S-transferase fusion protein (UreA sequence from H. pylon strain ATCC 43504; Thomas et al., Acta Gastro-Enterologica Belgica 56:54, 1993); UreA+UreB holoenzyme purified from H. pylon strain NCTC11637 (Marchetti et al., Science 267:1655, 1995); a UreA-MBP fusion protein (UreA from H. pylon strain 85P; Ferrero et al., Infection and Immunity 62:4981, 1994); a UreB-MBP fusion protein (UreB from H. pylori strain 85P; Ferrero et al., supra); a UreA-MBP fusion protein (UreA from H. felis strain ATCC 49179; Ferrero et al., supra); a UreB-MBP fusion protein (UreB from H. felis strain ATCC 49179; Ferrero et al., supra); and a 37 kDa fragment of UreB containing amino acids 220-569 (Dore-Davin et al., “A 37 kD fragment of UreB is sufficient to confer protection against Helicobacterfelis infection in mice”). Finally, Thomas et al. (supra) showed that oral immunization of mice with crude sonicates of H. pylon protected mice from subsequent challenge with H. felis.

[0026] Polynucleotides, e.g., DNA molecules, encoding allelic variants can easily be obtained by polymerase chain reaction (PCR) amplification of genomic bacterial DNA extracted by conventional methods. This involves the use of synthetic oligonucleotide primers matching sequences that are upstream and downstream of the 5′ and 3′ ends of the coding region. Suitable primers can be designed based on the nucleotide sequence information provided in the sequence listing. Typically, a primer consists of 10 to 40, preferably 15 to 25 nucleotides. It can also be advantageous to select primers containing C and G nucleotides in proportions sufficient to ensure efficient hybridization, e.g., an amount of C and G nucleotides of at least 40%, preferably 50%, of the total nucleotide amount. Those skilled in the art can readily design primers that can be used to isolate the polynucleotides of the invention from different Helicobacter strains. Experimental conditions for carrying out PCR can readily be determined by one skilled in the art and an illustration of carrying out PCR is provided in Example 2. As is well known in the art, restriction endonuclease recognition sites that contain, typically, 4 to 6 nucleotides (for example, the sequences 5′-GGATCC-3′ (BamHI) or 5′-CTCGAG-3′ (XhoI)), can be included on the 5′ ends of the primers. Restriction sites can be selected by those skilled in the art so that the amplified DNA can be conveniently cloned into an appropriately digested vector, such as a plasmid.

[0027] Useful homologs that do not occur naturally can be designed using known methods for identifying regions of an antigen that are likely to be tolerant of amino acid sequence changes and/or deletions. For example, sequences of the antigen from different species can be compared to identify conserved sequences.

[0028] Polypeptide derivatives that are encoded by polynucleotides of the invention include, e.g., fragments, polypeptides having large internal deletions derived from full-length polypeptides, and fusion proteins. Polypeptide fragments of the invention can be derived from a polypeptide having a sequence homologous to any of the sequences of the sequence listing, to the extent that the fragments retain the substantial antigenicity of the parent polypeptide (specific antigenicity). Polypeptide derivatives can also be constructed by large internal deletions that remove a substantial part of the parent polypeptide, while retaining specific antigenicity. Generally, polypeptide derivatives should be about at least 12 amino acids in length to maintain antigenicity. Advantageously, they can be at least 20 amino acids, preferably at least 50 amino acids, more preferably at least 75 amino acids, and most preferably at least 100 amino acids in length.

[0029] Useful polypeptide derivatives, e.g., polypeptide fragments, can be designed using computer-assisted analysis of amino acid sequences in order to identify sites in protein antigens having potential as surface-exposed, antigenic regions (Hughes et al., Infect. Immun. 60(9):3497, 1992). For example, the Laser Gene Program from DNA Star can be used to obtain hydrophilicity, antigenic index, and intensity index plots for the polypeptides of the invention. This program can also be used to obtain information about homologies of the polypeptides with known protein motifs. One skilled in the art can readily use the information provided in such plots to select peptide fragments for use as vaccine antigens. For example, fragments spanning regions of the plots in which the antigenic index is relatively high can be selected. One can also select fragments spanning regions in which both the antigenic index and the intensity plots are relatively high. Fragments containing conserved sequences, particularly hydrophilic conserved sequences, can also be selected.

[0030] Polypeptide fragments and polypeptides having large internal deletions can be used for revealing epitopes that are otherwise masked in the parent polypeptide and that may be of importance for inducing a protective T cell-dependent immune response. Deletions can also remove immunodominant regions of high variability among strains.

[0031] It is an accepted practice in the field of immunology to use fragments and variants of protein immunogens as vaccines, as all that is required to induce an immune response to a protein is a small (e.g., 8 to 10 amino acids) immunogenic region of the protein. This has been done for a number of vaccines against pathogens other than Helicobacter. For example, short synthetic peptides corresponding to surface-exposed antigens of pathogens such as murine mammary tumor virus (peptide containing 11 amino acids; Dion et al., Virology 179:474-477, 1990), Semliki Forest virus (peptide containing 16 amino acids; Snijders et al., J. Gen. Virol. 72:557-565, 1991), and canine parvovirus (2 overlapping peptides, each containing 15 amino acids; Langeveld et al., Vaccine 12(15):1473-1480, 1994) have been shown to be effective vaccine antigens against their respective pathogens.

[0032] Polynucleotides encoding polypeptide fragments and polypeptides having large internal deletions can be constructed using standard methods (see, e.g., Ausubel et al., Current Protocols in Molecular Biology, John Wiley & Sons Inc., 1994), for example, by PCR, including inverse PCR, by restriction enzyme treatment of the cloned DNA molecules, or by the method of Kunkel et al. (Proc. Natl. Acad. Sci. USA 82:448, 1985; biological material available at Stratagene).

[0033] A polypeptide derivative can also be produced as a fusion polypeptide that contains a polypeptide or a polypeptide derivative of the invention fused, e.g., at the N- or C-terminal end, to any other polypeptide (hereinafter referred to as a peptide tail).

[0034] Such a product can be easily obtained by translation of a genetic fusion, i.e., a hybrid gene. Vectors for expressing fusion polypeptides are commercially available, and include the pMal-c2 or pMal-p2 systems of New England Biolabs, in which the peptide tail is a maltose binding protein, the glutathione-S-transferase system of Pharmacia, or the His-Tag system available from Novagen. These and other expression systems provide convenient means for further purification of polypeptides and derivatives of the invention.

[0035] Another particular example of fusion polypeptides included in invention includes a polypeptide or polypeptide derivative of the invention fused to a polypeptide having adjuvant activity, such as, e.g., subunit B of either cholera toxin or E. coli heat-labile toxin. Several possibilities can be used for producing such fusion proteins. First, the polypeptide of the invention can be fused to the N-terminal end or, preferably, to the C-terminal end of the polypeptide having adjuvant activity. Second, a polypeptide fragment of the invention can be fused within the amino acid sequence of the polypeptide having adjuvant activity. Spacer sequences can also be included, if desired.

[0036] As stated above, the polynucleotides of the invention encode Helicobacter polypeptides in precursor or mature form. They can also encode hybrid precursors containing heterologous signal peptides, which can mature into polypeptides of the invention. By “heterologous signal peptide” is meant a signal peptide that is not found in the naturally-occurring precursor of a polypeptide of the invention.

[0037] A polynucleotide of the invention hybridizes, preferably under stringent conditions, to a polynucleotide having a sequence as shown in the sequence listing. Hybridization procedures are, e.g., described by Ausubel et al. (supra); Silhavy et al. (Experiments with Gene Fusions, Cold Spring Harbor Laboratory Press, Cold Spring Harbor, N.Y., 1984); and Davis et al. (A Manual for Genetic Engineering: Advanced Bacterial Genetics, Cold Spring Harbor Laboratory Press, Cold Spring Harbor, N.Y., 1980). Important parameters that can be considered for optimizing hybridization conditions are reflected in the following formula, which facilitates calculation of the melting temperature (Tm), which is the temperature above which two complementary DNA strands separate from one another (Casey et al., Nucl. Acid Res. 4:1539, 1977): Tm=81.5+0.5×(% G+C)+1.6 log (positive ion concentration)-0.6× (% formamide). Under appropriate stringency conditions, hybridization temperature (Th) is approximately 20 to 40° C., 20 to 25° C., or, preferably, 30 to 40° C. below the calculated Tm. Those skilled in the art will understand that optimal temperature and salt conditions can be readily determined empirically in preliminary experiments using conventional procedures. For example, stringent conditions can be achieved, both for pre-hybridizing and hybridizing incubations, (i) within 4-16 hours at 42° C., in 6× SSC containing 50% formamide or (ii) within 4-16 hours at 65° C. in an aqueous 6× SSC solution (1 M NaCl, 0.1 M sodium citrate (pH 7.0)). For polynucleotides containing 30 to 600 nucleotides, the above formula is used and then is corrected by subtracting (600/polynucleotide size in base pairs). Stringency conditions are defined by a Th that is 5 to 10° C. below Tm.

[0038] Hybridization conditions with oligonucleotides shorter than 20-30 bases do not precisely follow the rules set forth above. In such cases, the formula for calculating the Tm is as follows: Tm=4×(G+C)+2 (A+T). For example, an 18 nucleotide fragment of 50% G+C would have an approximate Tm of 54° C.

[0039] A polynucleotide molecule of the invention, containing RNA, DNA, or modifications or combinations thereof, can have various applications. For example, a polynucleotide molecule can be used (i) in a process for producing the encoded polypeptide in a recombinant host system, (ii) in the construction of vaccine vectors such as poxyiruses, which are further used in methods and compositions for preventing and/or treating Helicobacter infection, (iii) as a vaccine agent, in a naked form or formulated with a delivery vehicle and, (iv) in the construction of attenuated Helicobacter strains that can over-express a polynucleotide of the invention or express it in a non-toxic, mutated form.

[0040] According to a second aspect of the invention, there is therefore provided (i) an expression cassette containing a polynucleotide molecule of the invention placed under the control of elements (e.g., a promoter) required for expression; (ii) an expression vector containing an expression cassette of the invention; (iii) a procaryotic or eucaryotic cell transformed or transfected with an expression cassette and/or vector of the invention, as well as (iv) a process for producing a polypeptide or polypeptide derivative encoded by a polynucleotide of the invention, which involves culturing a procaryotic or eucaryotic cell transformed or transfected with an expression cassette and/or vector of the invention, under conditions that allow expression of the polynucleotide molecule of the invention and, recovering the encoded polypeptide or polypeptide derivative from the cell culture.

[0041] A recombinant expression system can be selected from procaryotic and eucaryotic hosts. Eucaryotic hosts include, for example, yeast cells (e.g., Saccharomyces cerevisiae or Pichia Pastoris), mammalian cells (e.g., COS 1, NIH3T3, or JEG3 cells), arthropods cells (e.g., Spodoptera frugiperda (SF9) cells), and plant cells. Preferably, a procaryotic host such as E. coli is used. Bacterial and eucaryotic cells are available from a number of different sources that are known to those skilled in the art, e.g., the American Type Culture Collection (ATCC; Rockville, Md.).

[0042] The choice of the expression cassette will depend on the host system selected, as well as the features desired for the expressed polypeptide. For example, it may be useful to produce a polypeptide of the invention in a particular lipidated form or any other form. Typically, an expression cassette includes a constitutive or inducible promoter that is functional in the selected host system; a ribosome binding site; a start codon (ATG); if necessary, a region encoding a signal peptide, e.g., a lipidation signal peptide; a polynucleotide molecule of the invention; a stop codon; and, optionally, a 3′ terminal region (translation and/or transcription terminator). The signal peptide-encoding region is adjacent to the polynucleotide of the invention and is placed in the proper reading frame. The signal peptide-encoding region can be homologous or heterologous to the polynucleotide molecule encoding the mature polypeptide and it can be specific to the secretion apparatus of the host used for expression. The open reading frame constituted by the polynucleotide molecule of the invention, alone or together with the signal peptide, is placed under the control of the promoter so that transcription and translation occur in the host system. Promoters and signal peptide-encoding regions are widely known and available to those skilled in the art and include, for example, the promoter of Salmonella typhimurium (and derivatives) that is inducible by arabinose (promoter araB) and is functional in Gram-negative bacteria such as E. coli (U.S. Pat. No. 5,028,530; Cagnon et al., Protein Engineering 4(7):843, 1991); the promoter of the bacteriophage T7 RNA polymerase gene, which is functional in a number of E. coli strains expressing T7 polymerase (U.S. Pat. No. 4,952,496); the OspA lipidation signal peptide; and RlpB lipidation signal peptide (Takase et al., J. Bact. 169:5692, 1987).

[0043] The expression cassette is typically part of an expression vector, which is selected for its ability to replicate in the chosen expression system. Expression vectors (e.g., plasmids or viral vectors) can be chosen from, for example, those described in Pouwels et al. (Cloning Vectors: A Laboratory Manual, 1985, Supp. 1987) and can purchased from various commercial sources. Methods for transforming or transfecting host cells with expression vectors are well known in the art and will depend on the host system selected, as described in Ausubel et al. (supra).

[0044] Upon expression, a recombinant polypeptide of the invention (or a polypeptide derivative) is produced and remains in the intracellular compartment, is secreted/excreted in the extracellular medium or in the periplasmic space, or is embedded in the cellular membrane. The polypeptide can then be recovered in a substantially purified form from the cell extract or from the supernatant after centrifugation of the cell culture. Typically, the recombinant polypeptide can be purified by antibody-based affinity purification or by any other method known to a person skilled in the art, such as by genetic fusion to a small affinity-binding domain. Antibody-based affinity purification methods are also available for purifying a polypeptide of the invention extracted from a Helicobacter strain. Antibodies useful for immunoaffinity purification of the polypeptides of the invention can be obtained using methods described below.

[0045] Polynucleotides of the invention can also be used in DNA vaccination methods, using either a viral or bacterial host as gene delivery vehicle (live vaccine vector) or administering the gene in a free form, e.g., inserted into a plasmid. Therapeutic or prophylactic efficacy of a polynucleotide of the invention can be evaluated as is described below.

[0046] Accordingly, in a third aspect of the invention, there is provided (i) a vaccine vector such as a poxyirus, containing a polynucleotide molecule of the invention placed under the control of elements required for expression; (ii) a composition of matter containing a vaccine vector of the invention, together with a diluent or carrier; (iii) a pharmaceutical composition containing a therapeutically or prophylactically effective amount of a vaccine vector of the invention; (iv) a method for inducing an immune response against Helicobacter in a mammal (e.g., a human; alternatively, the method can be used in veterinary applications for treating or preventing Helicobacter infection of animals, e.g., cats or birds), which involves administering to the mammal an immunogenically effective amount of a vaccine vector of the invention to elicit an immune response, e.g., a protective or therapeutic immune response to Helicobacter; and (v) a method for preventing and/or treating a Helicobacter (e.g., H. pylon, H. felis, H. mustelae, or H. heilmanii) infection, which involves administering a prophylactic or therapeutic amount of a vaccine vector of the invention to an individual in need. Additionally, the third aspect of the invention encompasses the use of a vaccine vector of the invention in the preparation of a medicament for preventing and/or treating Helicobacter infection.

[0047] A vaccine vector of the invention can express one or several polypeptides or derivatives of the invention, as well as at least one additional Helicobacter antigen such as a urease apoenzyme or a subunit, fragment, homolog, mutant, or derivative thereof. In addition, it can express a cytokine, such as interleukin-2 (IL-2) or interleukin-12 (IL-12), that enhances the immune response. Thus, a vaccine vector can include an additional polynucleotide molecules encoding, e.g., urease subunit A, B, or both, or a cytokine, placed under the control of elements required for expression in a mammalian cell.

[0048] Alternatively, a composition of the invention can include several vaccine vectors, each of which being capable of expressing a polypeptide or derivative of the invention. A composition can also contain a vaccine vector capable of expressing an additional Helicobacter antigen such as urease apoenzyme, a subunit, fragment, homolog, mutant, or derivative thereof, or a cytokine such as IL-2 or IL-12.

[0049] In vaccination methods for treating or preventing infection in a mammal, a vaccine vector of the invention can be administered by any conventional route in use in the vaccine field, for example, to a mucosal (e.g., ocular, intranasal, oral, gastric, pulmonary, intestinal, rectal, vaginal, or urinary tract) surface or via a parenteral (e.g., subcutaneous, intradermal, intramuscular, intravenous, or intraperitoneal) route. Preferred routes depend upon the choice of the vaccine vector. The administration can be achieved in a single dose or repeated at intervals. The appropriate dosage depends on various parameters that are understood by those skilled in the art, such as the nature of the vaccine vector itself, the route of administration, and the condition of the mammal to be vaccinated (e.g., the weight, age, and general health of the mammal).

[0050] Live vaccine vectors that can be used in the invention include viral vectors, such as adenoviruses and poxyiruses, as well as bacterial vectors, e.g., Shigella, Salmonella, Vibrio cholerae, Lactobacillus, Bacille bilié de Calmette-Guérin (BCG), and Streptococcus. An example of an adenovirus vector, as well as a method for constructing an adenovirus vector capable of expressing a polynucleotide molecule of the invention, is described in U.S. Pat. No. 4,920,209. Poxyirus vectors that can be used in the invention include, e.g., vaccinia and canary pox viruses, which are described in U.S. Pat. Nos. 4,722,848 and 5,364,773, respectively (also see, e.g., Tartaglia et al., Virology 188:217, 1992, for a description of a vaccinia virus vector, and Taylor et al, Vaccine 13:539, 1995, for a description of a canary poxyirus vector). Poxyirus vectors capable of expressing a polynucleotide of the invention can be obtained by homologous recombination, as described in Kieny et al. (Nature 312:163, 1984) so that the polynucleotide of the invention is inserted in the viral genome under appropriate conditions for expression in mammalian cells. Generally, the dose of viral vector vaccine, for therapeutic or prophylactic use, can be from about 1×10⁴ to about 1×10¹¹, advantageously from about 1×10⁷ to about 1×10¹⁰, or, preferably, from about 1×10⁷ to about 1×10⁹ plaque-forming units per kilogram. Preferably, viral vectors are administered parenterally, for example, in 3 doses that are 4 weeks apart. Those skilled in the art will recognize that it is preferable to avoid adding a chemical adjuvant to a composition containing a viral vector of the invention and thereby minimizing the immune response to the viral vector itself.

[0051] Non-toxicogenic Vibrio cholerae mutant strains that can be used in live oral vaccines are described by Mekalanos et al. (Nature 306:551, 1983) and in U.S. Pat. No. 4,882,278 (strain in which a substantial amount of the coding sequence of each of the two ctxA alleles has been deleted so that no functional cholerae toxin is produced); WO 92/11354 (strain in which the irgA locus is inactivated by mutation; this mutation can be combined in a single strain with ctxA mutations); and WO 94/1533 (deletion mutant lacking functional ctxA and attRS1 DNA sequences). These strains can be genetically engineered to express heterologous antigens, as described in WO 94/19482. An effective vaccine dose of a V. cholerae strain capable of expressing a polypeptide or polypeptide derivative encoded by a polynucleotide molecule of the invention can contain, e.g., about 1×10⁵ to about 1×10⁹, preferably about 1×10⁶ to about 1×10⁸ viable bacteria in an appropriate volume for the selected route of administration. Preferred routes of administration include all mucosal routes, but, most preferably, these vectors are administered intranasally or orally.

[0052] Attenuated Salmonella typhimurium strains, genetically engineered for recombinant expression of heterologous antigens, and their use as oral vaccines, are described by Nakayama et al. (Bio/Technology 6:693, 1988) and in WO 92/11361. Preferred routes of administration for these vectors include all mucosal routes. Most preferably, the vectors are administered intranasally or orally.

[0053] Others bacterial strains useful as vaccine vectors are described by High et al. (EMBO 11:1991, 1992) and Sizemore et al. (Science 270:299, 1995; Shigella flexneri); Medaglini et al. (Proc. Natl. Acad. Sci. USA 92:6868, 1995; (Streptococcus gordonii); Flynn (Cell. Mol. Biol. 40 (suppl. I):31, 1194), and in WO 88/6626, WO 90/0594, WO 91/13157, WO 92/1796, and WO 92/21376 (Bacille Calmette Guerin). In bacterial vectors, a polynucleotide of the invention can be inserted into the bacterial genome or it can remain in a free state, for example, carried on a plasmid.

[0054] An adjuvant can also be added to a composition containing a bacterial vector vaccine. A number of adjuvants that can be used are known to those skilled in the art. For example, preferred adjuvants can be selected from the list provided below.

[0055] According to a fourth aspect of the invention, there is also provided (i) a composition of matter containing a polynucleotide of the invention, together with a diluent or carrier; (ii) a pharmaceutical composition containing a therapeutically or prophylactically effective amount of a polynucleotide of the invention; (iii) a method for inducing an immune response against Helicobacter, in a mammal, by administering to the mammal an immunogenically effective amount of a polynucleotide of the invention to elicit an immune response, e.g., a protective immune response to Helicobacter; and (iv) a method for preventing and/or treating a Helicobacter (e.g., H. pylon, H. felis, H. mustelae, or H. heilmanii) infection, by administering a prophylactic or therapeutic amount of a polynucleotide of the invention to an individual in need of such treatment.

[0056] Additionally, the fourth aspect of the invention encompasses the use of a polynucleotide of the invention in the preparation of a medicament for preventing and/or treating Helicobacter infection. The fourth aspect of the invention preferably includes the use of a polynucleotide molecule placed under conditions for expression in a mammalian cell, e.g., in a plasmid that is unable to replicate in mammalian cells and to substantially integrate into a mammalian genome.

[0057] Polynucleotides (for example, DNA or RNA molecules) of the invention can also be administered as such to a mammal as a vaccine. When a DNA molecule of the invention is used, it can be in the form of a plasmid that is unable to replicate in a mammalian cell and unable to integrate into the mammalian genome. Typically, a DNA molecule is placed under the control of a promoter suitable for expression in a mammalian cell. The promoter can function ubiquitously or tissue-specifically. Examples of non-tissue specific promoters include the early Cytomegalovirus (CMV) promoter (U.S. Pat. No. 4,168,062) and the Rous Sarcoma Virus promoter (Norton et al., Molec. Cell Biol. 5:281, 1985). The desmin promoter (Li et al., Gene 78:243, 1989; Li et al., J. Biol. Chem. 266:6562, 1991; Li et al., J. Biol. Chem. 268:10403, 1993) is tissue-specific and drives expression in muscle cells. More generally, useful promoters and vectors are described, e.g., in WO 94/21797 and by Hartikka et al. (Human Gene Therapy 7:1205, 1996).

[0058] For DNA/RNA vaccination, the polynucleotide of the invention can encode a precursor or a mature form of a polypeptide of the invention. When it encodes a precursor form, the precursor sequence can be homologous or heterologous. In the latter case, a eucaryotic leader sequence can be used, such as the leader sequence of the tissue-type plasminogen factor (tPA).

[0059] A composition of the invention can contain one or several polynucleotides of the invention. It can also contain at least one additional polynucleotide encoding another Helicobacter antigen, such as urease subunit A, B, or both, or a fragment, derivative, mutant, or analog thereof. A polynucleotide encoding a cytokine, such as interleukin-2 (IL-2) or interleukin-12 (IL-12), can also be added to the composition so that the immune response is enhanced. These additional polynucleotides are placed under appropriate control for expression. Advantageously, DNA molecules of the invention and/or additional DNA molecules to be included in the same composition are carried in the same plasmid.

[0060] Standard methods can be used in the preparation of therapeutic polynucleotides of the invention. For example, a polynucleotide can be used in a naked form, free of any delivery vehicles, such as anionic liposomes, cationic lipids, microparticles, e.g., gold microparticles, precipitating agents, e.g., calcium phosphate, or any other transfection-facilitating agent. In this case, the polynucleotide can be simply diluted in a physiologically acceptable solution, such as sterile saline or sterile buffered saline, with or without a carrier. When present, the carrier preferably is isotonic, hypotonic, or weakly hypertonic, and has a relatively low ionic strength, such as provided by a sucrose solution, e.g., a solution containing 20% sucrose.

[0061] Alternatively, a polynucleotide can be associated with agents that assist in cellular uptake. It can be, e.g., (i) complemented with a chemical agent that modifies cellular permeability, such as bupivacaine (see, e.g., WO 94/16737), (ii) encapsulated into liposomes, or (iii) associated with cationic lipids or silica, gold, or tungsten microparticles.

[0062] Anionic and neutral liposomes are well-known in the art (see, e.g., Liposomes: A Practical Approach, RPC New Ed, IRL Press, 1990, for a detailed description of methods for making liposomes) and are useful for delivering a large range of products, including polynucleotides.

[0063] Cationic lipids can also be used for gene delivery. Such lipids include, for example, Lipofectin™, which is also known as DOTMA (N-[1-(2,3-dioleyloxy)propyl]-N,N,N-trimethylammonium chloride), DOTAP (1,2-bis(oleyloxy)-3-(trimethylammonio)propane), DDAB (dimethyldioctadecylammonium bromide), DOGS (dioctadecylamidologlycyl spermine), and cholesterol derivatives. A description of these cationic lipids can be found in EP 187,702, WO 90/11092, U.S. Pat. No. 5,283,185, WO 91/15501, WO 95/26356, and U.S. Pat. No. 5,527,928. Cationic lipids for gene delivery are preferably used in association with a neutral lipid such as DOPE (dioleyl phosphatidylethanolamine; WO 90/11092). Other transfection-facilitating compounds can be added to a formulation containing cationic liposomes. A number of them are described in, e.g., WO 93/18759, WO 93/19768, WO 94/25608, and WO 95/2397. They include, e.g., spermine derivatives useful for facilitating the transport of DNA through the nuclear membrane (see, for example, WO 93/18759) and membrane-permeabilizing compounds such as GALA, Gramicidine S, and cationic bile salts (see, for example, WO 93/19768).

[0064] Gold or tungsten microparticles can also be used for gene delivery, as described in WO 91/359, WO 93/17706, and by Tang et al. (Nature 356:152, 1992). In this case, the microparticle-coated polynucleotides can be injected via intradermal or intraepidermal routes using a needleless injection device (“gene gun”), such as those described in U.S. Pat. No. 4,945,050, 5,015,580, and WO 94/24263.

[0065] The amount of DNA to be used in a vaccine recipient depends, e.g., on the strength of the promoter used in the DNA construct, the immunogenicity of the expressed gene product, the condition of the mammal intended for administration (e.g., the weight, age, and general health of the mammal), the mode of administration, and the type of formulation. In general, a therapeutically or prophylactically effective dose from about 1 μg to about 1 mg, preferably, from about 10 μg to about 800 μg, and, more preferably, from about 25 μg to about 250 μg, can be administered to human adults. The administration can be achieved in a single dose or repeated at intervals.

[0066] The route of administration can be any conventional route used in the vaccine field. As general guidance, a polynucleotide of the invention can be administered via a mucosal surface, e.g., an ocular, intranasal, pulmonary, oral, intestinal, rectal, vaginal, or urinary tract surface, or via a parenteral route, e.g., by an intravenous, subcutaneous, intraperitoneal, intradermal, intraepidermal, or intramuscular route. The choice of administration route will depend on, e.g., the formulation that is selected. A polynucleotide formulated in association with bupivacaine is advantageously administered into muscle. When a neutral or anionic liposome or a cationic lipid, such as DOTMA, is used, the formulation can be advantageously injected via intravenous, intranasal (for example, by aerosolization), intramuscular, intradermal, and subcutaneous routes. A polynucleotide in a naked form can advantageously be administered via the intramuscular, intradermal, or subcutaneous routes. Although not absolutely required, such a composition can also contain an adjuvant. A systemic adjuvant that does not require concomitant administration in order to exhibit an adjuvant effect is preferable.

[0067] The sequence information provided in the present application enables the design of specific nucleotide probes and primers that can be used in diagnostic methods. Accordingly, in a fifth aspect of the invention, there is provided a nucleotide probe or primer having a sequence found in, or derived by degeneracy of the genetic code from, a sequence shown in the sequence listing.

[0068] The term “probe” as used in the present application refers to DNA (preferably single stranded) or RNA molecules (or modifications or combinations thereof) that hybridize under the stringent conditions, as defined above, to polynucleotide molecules having sequences homologous to any of those shown in the sequence listing, or to a complementary or anti-sense sequence of any of those shown in the sequence listing. Generally, probes are significantly shorter than the full-length sequences shown in the sequence listing. For example, they can contain from about 5 to about 100, preferably from about 10 to about 80 nucleotides. In particular, probes have sequences that are at least 75%, preferably at least 85%, more preferably 95% homologous to a portion of a sequence as shown in the sequence listing, or a sequence complementary to any of such sequences.

[0069] Probes can contain modified bases, such as inosine, methyl-5-deoxycytidine, deoxyuridine, dimethylamino-5-deoxyuridine, or diamino-2,6-purine. Sugar or phosphate residues can also be modified or substituted. For example, a deoxyribose residue can be replaced by a polyamide (Nielsen et al., Science 254:1497, 1991) and phosphate residues can be replaced by ester groups such as diphosphate, alkyl, arylphosphonate, and phosphorothioate esters. In addition, the 2′-hydroxyl group on ribonucleotides can be modified by addition of, e.g., alkyl groups.

[0070] Probes of the invention can be used in diagnostic tests, or as capture or detection probes. Such capture probes can be immobilized on solid supports, directly or indirectly, by covalent means or by passive adsorption. A detection probe can be labeled by a detectable label, for example a label selected from radioactive isotopes; enzymes, such as peroxidase and alkaline phosphatase; enzymes that are able to hydrolyze a chromogenic, fluorogenic, or luminescent substrate; compounds that are chromogenic, fluorogenic, or luminescent; nucleotide base analogs; and biotin.

[0071] Probes of the invention can be used in any conventional hybridization method, such as in dot blot methods (Maniatis et al., Molecular Cloning: A Laboratory Manual, Cold Spring Harbor Laboratory Press, Cold Spring Harbor, New York, 1982), Southern blot methods (Southern, J. Mol. Biol. 98:503, 1975), northern blot methods (identical to Southern blot to the exception that RNA is used as a target), or a sandwich method (Dunn et al., Cell 12:23, 1977). As is known in the art, the latter technique involves the use of a specific capture probe and a specific detection probe that have nucleotide sequences that are at least partially different from each other.

[0072] Primers used in the invention usually contain about 10 to 40 nucleotides and are used to initiate enzymatic polymerization of DNA in an amplification process (e.g., PCR), an elongation process, or a reverse transcription method. In a diagnostic method involving PCR, the primers can be labeled.

[0073] Thus, the invention also encompasses (i) a reagent containing a probe of the invention for detecting and/or identifying the presence of Helicobacter in a biological material; (ii) a method for detecting and/or identifying the presence of Helicobacter in a biological material, in which (a) a sample is recovered or derived from the biological material, (b) DNA or RNA is extracted from the material and denatured, and (c) the sample is exposed to a probe of the invention, for example, a capture probe, a detection probe, or both, under stringent hybridization conditions, so that hybridization is detected;

[0074] and (iii) a method for detecting and/or identifying the presence of Helicobacter in a biological material, in which (a) a sample is recovered or derived from the biological material, (b) DNA is extracted therefrom, (c) the extracted DNA is contacted with at least one, or, preferably two, primers of the invention, and amplified by the polymerase chain reaction, and (d) an amplified DNA molecule is produced.

[0075] As mentioned above, polypeptides that can be produced by expression of the polynucleotides of the invention can be used as vaccine antigens. Accordingly, a sixth aspect of the invention features a substantially purified polypeptide or polypeptide derivative having an amino acid sequence encoded by a polynucleotide of the invention.

[0076] A “substantially purified polypeptide” is defined as a polypeptide that is separated from the environment in which it naturally occurs and/or a polypeptide that is free of most of the other polypeptides that are present in the environment in which it was synthesized. The polypeptides of the invention can be purified from a natural source, such as a Helicobacter strain, or can be produced using recombinant methods.

[0077] Homologous polypeptides or polypeptide derivatives encoded by polynucleotides of the invention can be screened for specific antigenicity by testing cross-reactivity with an antiserum raised against a polypeptide having an amino acid sequence as shown in the sequence listing. Briefly, a monospecific hyperimmune antiserum can be raised against a purified reference polypeptide as such or as a fusion polypeptide, for example, an expression product of MBP, GST, or His-tag systems, or a synthetic peptide predicted to be antigenic. The homologous polypeptide or derivative that is screened for specific antigenicity can be produced as such or as a fusion polypeptide. In the latter case, and if the antiserum is also raised against a fusion polypeptide, two different fusion systems are employed. Specific antigenicity can be determined using a number of methods, including Western blot (Towbin et al., Proc. Natl. Acad. Sci. USA 76:4350, 1979), dot blot, and ELISA methods, as described below.

[0078] In a Western blot assay, the product to be screened, either as a purified preparation or a total E. coli extract, is fractionated by SDS-PAGE, as described, for example, by Laemmli (Nature 227:680, 1970). After being transferred to a filter, such as a nitrocellulose membrane, the material is incubated with the monospecific hyperimmune antiserum, which is diluted in a range of dilutions from about 1:50 to about 1:5000, preferably from about 1:100 to about 1:500. Specific antigenicity is shown once a band corresponding to the product exhibits reactivity at any of the dilutions in the range.

[0079] In an ELISA assay, the product to be screened can be used as the coating antigen. A purified preparation is preferred, but a whole cell extract can also be used. Briefly, about 100 μL of a preparation of about 10 μg protein/mL is distributed into wells of a 96-well ELISA plate. The plate is incubated for about 2 hours at 37° C., then overnight at 4° C. The plate is washed with phosphate buffer saline (PBS) containing 0.05% Tween 20 (PBS/Tween buffer) and the wells are saturated with 250 μL PBS containing 1% bovine serum albumin (BSA), to prevent non-specific antibody binding. After 1 hour of incubation at 37° C., the plate is washed with PBS/Tween buffer. The antiserum is serially diluted in PBS/Tween buffer containing 0.5% BSA, and 100 μL dilutions are added to each well. The plate is incubated for 90 minutes at 37° C., washed, and evaluated using standard methods. For example, a goat anti-rabbit peroxidase conjugate can be added to the wells when the specific antibodies used were raised in rabbits. Incubation is carried out for about 90 minutes at 37° C. and the plate is washed.

[0080] The reaction is developed with the appropriate substrate and the reaction is measured by colorimetry (absorbance measured spectrophotometrically). Under these experimental conditions, a positive reaction is shown once an O.D. value of 1.0 is detected with a dilution of at least about 1:50, preferably of at least about 1:500.

[0081] In a dot blot assay, a purified product is preferred, although a whole cell extract can be used. Briefly, a solution of the product at a concentration of about 100 μg/mL is serially diluted two-fold with 50 mM Tris-HCl (pH 7.5). One hundred μL of each dilution is applied to a filter, such as a 0.45 μm nitrocellulose membrane, set in a 96-well dot blot apparatus (Biorad). The buffer is removed by applying vacuum to the system. Wells are washed by addition of 50 mM Tris-HCl (pH 7.5) and the membrane is air-dried. The membrane is saturated in blocking buffer (50 mM Tris-HCl (pH 7.5), 0.15 M NaCl, 10 g/L skim milk) and incubated with an antiserum diluted from about 1:50 to about 1:5000, preferably about 1:500. The reaction is detected using standard methods. For example, a goat anti-rabbit peroxidase conjugate can be added to the wells when rabbit antibodies are used. Incubation is carried out for about 90 minutes at 37° C. and the blot is washed. The reaction is developed with the appropriate substrate and stopped. The reaction is then measured visually by the appearance of a colored spot, e.g., by colorimetry. Under these experimental conditions, a positive reaction is associated with detection of a colored spot for reactions carried out with a dilution of at least about 1:50, preferably, of at least about 1:500. Therapeutic or prophylactic efficacy of a polypeptide or polypeptide derivative of the invention can be evaluated as described below.

[0082] According to a seventh aspect of the invention, there is provided (i) a composition of matter containing a polypeptide of the invention together with a diluent or carrier; (ii) a pharmaceutical composition containing a therapeutically or prophylactically effective amount of a polypeptide of the invention; (iii) a method for inducing an immune response against Helicobacter in a mammal by administering to the mammal an immunogenically effective amount of a polypeptide of the invention to elicit an immune response, e.g., a protective immune response to Helicobacter; and (iv) a method for preventing and/or treating a Helicobacter (e.g., H. pylon, H. felis, H. mustelae, or H. heilmanii) infection, by administering a prophylactic or therapeutic amount of a polypeptide of the invention to an individual in need of such treatment. Additionally, this aspect of the invention includes the use of a polypeptide of the invention in the preparation of a medicament for preventing and/or treating Helicobacter infection.

[0083] The immunogenic compositions of the invention can be administered by any conventional route in use in the vaccine field, for example, to a mucosal (e.g., ocular, intranasal, pulmonary, oral, gastric, intestinal, rectal, vaginal, or urinary tract) surface or via a parenteral (e.g., subcutaneous, intradermal, intramuscular, intravenous, or intraperitoneal) route. The choice of the administration route depends upon a number of parameters, such as the adjuvant used. For example, if a mucosal adjuvant is used, the intranasal or oral route will be preferred, and if a lipid formulation or an aluminum compound is used, a parenteral route will be preferred. In the latter case, the subcutaneous or intramuscular route is most preferred. The choice of administration route can also depend upon the nature of the vaccine agent. For example, a polypeptide of the invention fused to CTB or to LTB will be best administered to a mucosal surface.

[0084] A composition of the invention can contain one or several polypeptides or derivatives of the invention. It can also contain at least one additional Helicobacter antigen, such as the urease apoenzyme, or a subunit, fragment, homolog, mutant, or derivative thereof.

[0085] For use in a composition of the invention, a polypeptide or polypeptide derivative can be formulated into or with liposomes, such as neutral or anionic liposomes, microspheres, ISCOMS, or virus-like particles (VLPs), to facilitate delivery and/or enhance the immune response. These compounds are readily available to those skilled in the art; for example, see Liposomes: A Practical Approach (supra). Adjuvants other than liposomes can also be used in the invention and are well known in the art (see, for example, the list provided below).

[0086] Administration can be achieved in a single dose or repeated as necessary at intervals that can be determined by one skilled in the art. For example, a priming dose can be followed by three booster doses at weekly or monthly intervals. An appropriate dose depends on various parameters, including the nature of the recipient (e.g., whether the recipient is an adult or an infant), the particular vaccine antigen, the route and frequency of administration, the presence/absence or type of adjuvant, and the desired effect (e.g., protection and/or treatment), and can be readily determined by one skilled in the art. In general, a vaccine antigen of the invention can be administered mucosally in an amount ranging from about 10 μg to about 500 mg, preferably from about 1 mg to about 200 mg. For a parenteral route of administration, the dose usually should not exceed about 1 mg, and is, preferably, about 100 μg.

[0087] When used as components of a vaccine, the polynucleotides and polypeptides of the invention can be used sequentially as part of a multi-step immunization process. For example, a mammal can be initially primed with a vaccine vector of the invention, such as a pox virus, e.g., via a parenteral route, and then boosted twice with a polypeptide encoded by the vaccine vector, e.g., via the mucosal route. In another example, liposomes associated with a polypeptide or polypeptide derivative of the invention can be used for priming, with boosting being carried out mucosally using a soluble polypeptide or polypeptide derivative of the invention, in combination with a mucosal adjuvant (e.g., LT).

[0088] Polypeptides and polypeptide derivatives of the invention can also be used as diagnostic reagents for detecting the presence of anti-Helicobacter antibodies, e.g., in blood samples. Such polypeptides can be about 5 to about 80, preferably, about 10 to about 50 amino acids in length and can be labeled or unlabeled, depending upon the diagnostic method. Diagnostic methods involving such a reagent are described below.

[0089] Upon expression of a polynucleotide molecule of the invention, a polypeptide or polypeptide derivative is produced and can be purified using known methods. For example, the polypeptide or polypeptide derivative can be produced as a fusion protein containing a fused tail that facilitates purification. The fusion product can be used to immunize a small mammal, e.g., a mouse or a rabbit, in order to raise monospecific antibodies against the polypeptide or polypeptide derivative. The eighth aspect of the invention thus provides a monospecific antibody that binds to a polypeptide or polypeptide derivative of the invention.

[0090] By “monospecific antibody” is meant an antibody that is capable of reacting with a unique, naturally-occurring Helicobacter polypeptide. An antibody of the invention can be polyclonal or monoclonal. Monospecific antibodies can be recombinant, e.g., chimeric (e.g., consisting of a variable region of murine origin and a human constant region), humanized (e.g., a human immunoglobulin constant region and a variable region of animal, e.g., murine, origin), and/or single chain. Both polyclonal and monospecific antibodies can also be in the form of immunoglobulin fragments, e.g., F(ab)′2 or Fab fragments. The antibodies of the invention can be of any isotype, e.g., IgG or IgA, and polyclonal antibodies can be of a single isotype or can contain a mixture of isotypes.

[0091] The antibodies of the invention, which can be raised to a polypeptide or polypeptide derivative of the invention, can be produced and identified using standard immunological assays, e.g., Western blot assays, dot blot assays, or ELISA (see, e.g., Coligan et al., Current Protocols in Immunology, John Wiley & Sons, Inc., New York, N.Y., 1994). The antibodies can be used in diagnostic methods to detect the presence of Helicobacter antigens in a sample, such as a biological sample. The antibodies can also be used in affinity chromatography methods for purifying a polypeptide or polypeptide derivative of the invention. As is discussed further below, the antibodies can also be used in prophylactic and therapeutic passive immunization methods.

[0092] Accordingly, a ninth aspect of the invention provides (i) a reagent for detecting the presence of Helicobacter in a biological sample that contains an antibody, polypeptide, or polypeptide derivative of the invention; and (ii) a diagnostic method for detecting the presence of Helicobacter in a biological sample, by contacting the biological sample with an antibody, a polypeptide, or a polypeptide derivative of the invention, so that an immune complex is formed, and detecting the complex as an indication of the presence of Helicobacter in the sample or the organism from which the sample was derived. The immune complex is formed between a component of the sample and the antibody, polypeptide, or polypeptide derivative, and that any unbound material can be removed prior to detecting the complex. A polypeptide reagent can be used for detecting the presence of anti-Helicobacter antibodies in a sample, e.g., a blood sample, while an antibody of the invention can be used for screening a sample, such as a gastric extract or biopsy sample, for the presence of Helicobacter polypeptides.

[0093] For use in diagnostic methods, the reagent (e.g., the antibody, polypeptide, or polypeptide derivative of the invention) can be in a free state or can be immobilized on a solid support, such as, for example, on the interior surface of a tube or on the surface, or within pores, of a bead. Immobilization can be achieved using direct or indirect means. Direct means include passive adsorption (i.e., non-covalent binding) or covalent binding between the support and the reagent. By “indirect means” is meant that an anti-reagent compound that interacts with the reagent is first attached to the solid support. For example, if a polypeptide reagent is used, an antibody that binds to it can serve as an anti-reagent, provided that it binds to an epitope that is not involved in recognition of antibodies in biological samples. Indirect means can also employ a ligand-receptor system, for example, a molecule, such as a vitamin, can be grafted onto the polypeptide reagent and the corresponding receptor can be immobilized on the solid phase. This concept is illustrated by the well known biotin-streptavidin system. Alternatively, indirect means can be used, e.g., by adding to the reagent a peptide tail, chemically or by genetic engineering, and immobilizing the grafted or fused product by passive adsorption or covalent linkage of the peptide tail.

[0094] According to a tenth aspect of the invention, there is provided a process for purifying, from a biological sample, a polypeptide or polypeptide derivative of the invention, which involves carrying out antibody-based affinity chromatography with the biological sample, wherein the antibody is a monospecific antibody of the invention.

[0095] For use in a purification process of the invention, the antibody can be polyclonal or monospecific, and preferably is of the IgG type. Purified IgGs can be prepared from an antiserum using standard methods (see, e.g., Coligan et al., supra). Conventional chromatography supports, as well as standard methods for grafting antibodies, are described, for example, by Harlow et al. (Antibodies: A Laboratory Manual, Cold Spring Harbor Laboratory Press, Cold Spring Harbor, N.Y., 1988).

[0096] Briefly, a biological sample, such as an H. pylori extract, preferably in a buffer solution, is applied to a chromatography material, which is, preferably, equilibrated with the buffer used to dilute the biological sample, so that the polypeptide or polypeptide derivative of the invention (i.e., the antigen) is allowed to adsorb onto the material. The chromatography material, such as a gel or a resin coupled to an antibody of the invention, can be in batch form or in a column. The unbound components are washed off and the antigen is eluted with an appropriate elution buffer, such as a glycine buffer, a buffer containing a chaotropic agent, e.g., guanidine HCl, or a buffer having high salt concentration (e.g., 3 M MgCl₂). Eluted fractions are recovered and the presence of the antigen is detected, e.g., by measuring the absorbance at 280 nm.

[0097] An antibody of the invention can be screened for therapeutic efficacy as follows. According to an eleventh aspect of the invention, there is provided (i) a composition of matter containing a monospecific antibody of the invention, together with a diluent or carrier; (ii) a pharmaceutical composition containing a therapeutically or prophylactically effective amount of a monospecific antibody of the invention, and (iii) a method for treating or preventing Helicobacter (e.g., H. pylori, H. felis, H. mustelae, or H. heilmanii) infection, by administering a therapeutic or prophylactic amount of a monospecific antibody of the invention to an individual in need of such treatment. In addition, the eleventh aspect of the invention includes the use of a monospecific antibody of the invention in the preparation of a medicament for treating or preventing Helicobacter infection.

[0098] The monospecific antibody can be polyclonal or monoclonal, and is, preferably, predominantly of the IgA isotype. In passive immunization methods, the antibody is administered to a mucosal surface of a mammal, e.g., the gastric mucosa, e.g., orally or intragastrically, optionally, in the presence of a bicarbonate buffer. Alternatively, systemic administration, not requiring a bicarbonate buffer, can be carried out. A monospecific antibody of the invention can be administered as a single active agent or as a mixture with at least one additional monospecific antibody specific for a different Helicobacter polypeptide. The amount of antibody and the particular regimen used can be readily determined by one skilled in the art. For example, daily administration of about 100 to 1,000 mg of antibody over one week, or three doses per day of about 100 to 1,000 mg of antibody over two or three days, can be effective regimens for most purposes.

[0099] Therapeutic or prophylactic efficacy can be evaluated using standard methods in the art, e.g., by measuring induction of a mucosal immune response or induction of protective and/or therapeutic immunity, using, e.g., the H. felis mouse model and the procedures described by Lee et al. (Eur. J. Gastroenterology & Hepatology 7:303, 1995) or Lee et al. (J. Infect. Dis. 172:161, 1995). Those skilled in the art will recognize that the H. felis strain of the model can be replaced with another Helicobacter strain. For example, the efficacy of polynucleotide molecules and polypeptides from H. pylon is, preferably, evaluated in a mouse model using an H. pylon strain. Protection can be determined by comparing the degree of Helicobacter infection in the gastric tissue assessed by, for example, urease activity, bacterial counts, or gastritis, to that of a control group. Protection is shown when infection is reduced by comparison to the control group. Such an evaluation can be made for polynucleotides, vaccine vectors, polypeptides, and polypeptide derivatives, as well as for antibodies of the invention.

[0100] For example, various doses of an antibody of the invention can be administered to the gastric mucosa of mice previously challenged with an H. pylon strain, as described, e.g., by Lee et al. (supra). Then, after an appropriate period of time, the bacterial load of the mucosa can be estimated by assessing urease activity, as compared to a control. Reduced urease activity indicates that the antibody is therapeutically effective.

[0101] Adjuvants that can be used in any of the vaccine compositions described above are described as follows. Adjuvants for parenteral administration include, for example, aluminum compounds, such as aluminum hydroxide, aluminum phosphate, and aluminum hydroxy phosphate. The antigen can be precipitated with, or adsorbed onto, the aluminum compound using standard methods. Other adjuvants, such as RIBI (ImmunoChem, Hamilton, Mont.), can also be used in parenteral administration.

[0102] Adjuvants that can be used for mucosal administration include, for example, bacterial toxins, e.g., the cholera toxin (CT), the E. coli heat-labile toxin (LT), the Clostridium difficile toxin A, the pertussis toxin (PT), and combinations, subunits, toxoids, or mutants thereof. For example, a purified preparation of native cholera toxin subunit B (CTB) can be used. Fragments, homologs, derivatives, and fusions to any of these toxins can also be used, provided that they retain adjuvant activity. Preferably, a mutant having reduced toxicity is used. Suitable mutants are described, e.g., in WO 95/17211 (Arg-7-Lys CT mutant), WO 96/6627 (Arg-192-Gly LT mutant), and WO 95/34323 (Arg-9-Lys and Glu-129-Gly PT mutant). Additional LT mutants that can be used in the methods and compositions of the invention include, e.g., Ser-63-Lys, Ala-69-Gly, Glu-110-Asp, and Glu-112-Asp mutants. Other adjuvants, such as the bacterial monophosphoryl lipid A (MPLA) of, e.g., E. coli, Salmonella Minnesota, Salmonella typhimurium, or Shigella flexneri; saponins, and polylactide glycolide (PLGA) microspheres, can also be used in mucosal administration. Adjuvants useful for both mucosal and parenteral administrations, such as polyphosphazene (WO 95/2415), can also be used.

[0103] Any pharmaceutical composition of the invention, containing a polynucleotide, polypeptide, polypeptide derivative, or antibody of the invention, can be manufactured using standard methods. It can be formulated with a pharmaceutically acceptable diluent or carrier, e.g., water or a saline solution, such as phosphate buffer saline, optionally, including a bicarbonate salt, such as sodium bicarbonate, e.g., 0.1 to 0.5 M. Bicarbonate can advantageously be added to compositions intended for oral or intragastric administration. In general, a diluent or carrier can be selected on the basis of the mode and route of administration, and standard pharmaceutical practice. Suitable pharmaceutical carriers and diluents, as well as pharmaceutical necessities for their use in pharmaceutical formulations, are described in Remington's Pharmaceutical Sciences, a standard reference text in this field and in the USP/NF.

[0104] The invention also includes methods in which gastroduodenal infections, such as Helicobacter infection, are treated by oral administration of a Helicobacter polypeptide of the invention and a mucosal adjuvant, in combination with an antibiotic, an antisecretory agent, a bismuth salt, an antacid, sucralfate, or a combination thereof. Examples of such compounds that can be administered with the vaccine antigen and an adjuvant are antibiotics, including, e.g., macrolides, tetracyclines, β-lactams, aminoglycosides, quinolones, penicillins, and derivatives thereof (specific examples of antibiotics that can be used in the invention include, e.g., amoxicillin, clarithromycin, tetracycline, metronidizole, erythromycin, cefuroxime, and erythromycin); antisecretory agents, including, e.g., H₂-receptor antagonists (e.g., cimetidine, ranitidine, famotidine, nizatidine, and roxatidine), proton pump inhibitors (e.g., omeprazole, lansoprazole, and pantoprazole), prostaglandin analogs (e.g., misoprostil and enprostil), and anticholinergic agents (e.g., pirenzepine, telenzepine, carbenoxolone, and proglumide); and bismuth salts, including colloidal bismuth subcitrate, tripotassium dicitrate bismuthate, bismuth subsalicylate, bicitropeptide, and pepto-bismol (see, e.g., Goodwin et al., Helicobacter pylori, Biology and Clinical Practice, CRC Press, Boca Raton, Fla., pp 366-395, 1993; Physicians' Desk Reference, 49^{th} edn., Medical Economics Data Production Company, Montvale, N.J., 1995). In addition, compounds containing more than one of the above-listed components coupled together, e.g., ranitidine coupled to bismuth subcitrate, can be used. The invention also includes compositions for carrying out these methods, i.e., compositions containing a Helicobacter antigen (or antigens) of the invention, an adjuvant, and one or more of the above-listed compounds, in a pharmaceutically acceptable carrier or diluent.

[0105] Amounts of the above-listed compounds used in the methods and compositions of the invention can readily be determined by one skilled in the art. In addition, one skilled in the art can readily design treatment/immunization schedules. For example, the non-vaccine components can be administered on days 1-14, and the vaccine antigen +adjuvant can be administered on days 7, 14, 21, and 28.

[0106] Methods and pharmaceutical compositions of the invention can be used to treat or to prevent Helicobacter infections and, accordingly, gastroduodenal diseases associated with these infections, including acute, chronic, and atrophic gastritis, and peptic ulcer diseases, e.g., gastric and duodenal ulcers.

[0107] The invention is further illustrated by the following examples. Example 1 describes identification of genes, such as genes that encode the polypeptides of the invention, in the Helicobacter genome, as well as identification of leader sequences, and primer design for amplification of genes lacking signal sequences. Example 2 describes cloning of DNA molecules encoding polypeptides of the invention into a vector that provides a histidine tag, and production and purification of the resulting his-tagged fusion proteins. Example 3 describes methods for cloning DNA encoding the polypeptides of the invention so that they can be produced without his-tags, and Example 4 describes methods for purifying recombinantly produced polypeptides of the invention.

### EXAMPLE 1

### Identification of Genes in the H. pylori Genome, Identification of Leader Sequences, and Primer Design for Amplification of Genes Lacking Signal Sequences

[0108] 1.A. Creating H. pylori Genonic Databases

[0109] The H. pylon genome was provided as a text file containing a single contiguous string of nucleotides that had been determined to be 1.76 Megabases in length. The complete genome was split into 17 separate files using the program SPLIT (Creativity in Action), giving rise to 16 contigs, each containing 100,000 nucleotides, and a 17^{th} contig containing the remaining 76,000 nucleotides. A header was added to each of the 17 files using the format: >hpg0.txt (representing contig 1), .hpg1.txt (representing contig 2), etc. The resulting 17 files, named hpg0 through hpg16, were then copied together to form one file that represented the plus strand of the complete H. pylori genome. The constructed database was given the designation “H.” A negative strand database of the H. pylori genome was created similarly by first creating a reverse complement of the positive strand using the program SeqPup (D.G. Gilbert, Indiana University Biology Department) and then performing the same procedure as described above for the plus strand. This database was given the designation “N.”

[0110] The regions predicted to encode open reading frames (ORFs) were defined for the complete H. pylori genome using the program GENEMARK™ (Borodovsky et al., Comp. Chem. 17:123, 1993). A database was created from a text file containing an annotated version of all ORFs predicted to be encoded by the H. pylon genome for both the plus and minus strands, and was given the designation “O.” Each ORF was assigned a number indicating its location on the genome and its position relative to other genes. No manipulation of the text file was required.

[0111] 1.B. Searching the H. pylon Databases

[0112] The databases constructed as is described above were searched using the program FASTA (Pearson et al., Proc. Natl. Acad. Sci. USA 85:2444-2448, 1988).

[0113] FASTA was used for searching either a DNA sequence against either of the gene databases (“H” and/or “N”), or a peptide sequence against the ORF library (“O”). TFASTX was used to search a peptide sequence against all possible reading frames of a DNA database (“H” and/or “N” libraries). Potential frameshifts also being resolved, FASTX was used for searching the translated reading frames of a DNA sequence against either a DNA database, or a peptide sequence against the protein database.

[0114] 1.C. Isolation of DNA Sequences from the H. pylori Genome

[0115] The FASTA searches against the constructed DNA databases identified exact nucleotide coordinates on one or more of the isolated contigs, and therefore the location of the target DNA. Once the exact location of the target sequence was known, the contig identified to carry the gene was exported into the software package MapDraw (DNAStar, Inc.) and the gene was isolated. Gene sequences with flanking DNA was then excised and copied into the EditSeq. Software package (DNAStar, Inc.) for further analysis.

[0116] 1.D. Identification of Leader Sequences

[0117] The deduced protein encoded by a target gene sequence is analyzed using the PROTEAN software package (DNAStar, Inc.). This analysis predicts those areas of the protein that are hydrophobic by using the Kyte-Doolittle algorithm, and identifies any potential polar residues preceding the hydrophobic core region, which is typical for many leader sequences. For confirmation, the target protein is then searched against a PROSITE database (DNAStar, Inc.) consisting of motifs and signatures. Characteristic of many leader sequences and hydrophobic regions in general, is the identification of predicted prokaryotic lipid attachment sites. Where confirmation between the two approaches is apparent at the N-terminus of any protein, putative cleavage sites are sought. Specifically, this includes the presence of either an Alanine (A), Serine (S), or Glycine (G) residue immediately after the core hydrophobic region. In the case of lipoproteins, a Cysteine (C) residue would be identified as the +1 residue, post-cleavage.

[0118] 1.E. Rational Design of PCR Primers Based on the Identification of Leader Sequences

[0119] In order to clone gene sequences as N-terminus translational fusions for the generation of recombinant proteins with N-terminal Histidine tags, the gene sequence that specifies the leader sequence is omitted. The 5′-end of the gene-specific portion of the N-terminal primer is designed to start at the first codon beyond the cleavage site. In the case of lipoproteins, the 5′-end of the N-terminal primer begins at the second codon, immediately after the modifiable residue at position +1 post-cleavage. The omission of the leader sequence from the recombinant allows for one-step purification, and potential problems associated with insertion of leader sequences in the membrane of the host strain carrying the hybrid construct are avoided.

### EXAMPLE 2

### Preparation of Isolated DNA Encoding GHPO 136, GHPO 191, GHPO 411, GHPO 419, GHPO 724, and GHPO 427, and Production of These Polypeptides as Histidine-tagged Fusion Proteins

[0120] 2.A. Preparation of Genomic DNA from Helicobacter pylori

[0121] Helicobacter pylori strain ORV2001, stored in LB medium containing 50% glycerol at −70° C., is grown on Colombia agar containing 7% sheep blood for 48 hours under microaerophilic conditions (8-10% CO₂, 5-7% O₂, 85-87% N₂). Cells are harvested, washed with phosphate buffer saline (PBS) (pH 7.2), and DNA is then extracted from the cells using the Rapid Prep Genomic DNA Isolation kit (Pharmacia Biotech).

[0122] 2.B. PCR Amplification

[0123] DNA molecules encoding the polypeptides of the invention are amplified from genomic DNA, as can be prepared as is described above, by the Polymerase Chain Reaction (PCR) using primers set forth in the attached table. The N-terminal and C-terminal primers for each clone both include a 5′ clamp and a restriction enzyme recognition sequence for cloning purposes (BamHI (GGATCC) and XhoI (CTCGAG) recognition sequences).

[0124] Amplification of gene-specific DNA is carried out using Vent DNA Polymerase (New England Biolabs) or Taq DNA polymerase (Appligene), according to the manufacturer's instructions. The reaction mixture, which is brought to a final volume of 100 μL with distilled water, is as follows:

| | |
|---|---|
| dNTPs mix | 200 μM |
| 10x ThermoPol buffer | 10 μL |
| primers | 300 nM each |
| DNA template | 50 ng |
| Heat-stable DNA polymerase | 2 units |

[0125] Appropriate amplification reaction conditions can readily be determined by one skilled in the art. Specific examples of conditions are set forth in the accompanying table.

[0126] 2.C. Transformation and Selection of Transformants

[0127] A single PCR product is thus amplified and is then digested at 37° C. for 2 hours with BamHI and XhoI concurrently in a 20 μL reaction volume. The digested product is ligated to similarly cleaved pET28a (Novagen) that is dephosphorylated prior to the ligation by treatment with Calf Intestinal Alkaline Phosphatase (CIP). The gene fusion constructed in this manner allows one-step affinity purification of the resulting fusion protein because of the presence of histidine residues at the N-terminus of the fusion protein, which are encoded by the vector.

[0128] The ligation reaction (20 μL) is carried out at 14° C. overnight and then is used to transform 100 μL fresh E. coli XL1-blue competent cells (Novagen). The cells are incubated on ice for 2 hours, heat-shocked at 42° C. for 30 seconds, and returned to ice for 90 seconds. The samples are then added to 1 mL LB broth in the absence of selection and grown at 37° C. for 2 hours. The cells are plated out on LB agar containing kanamycin (50 μg/mL) at a 10× and neat dilution and incubated overnight at 37° C. The following day, 50 colonies are picked onto secondary plates and incubated at 37° C. overnight.

[0129] Five colonies are picked into 3 mL LB broth supplemented with kanamycin (100 μg/mL) and are grown overnight at 37° C. Plasmid DNA is extracted using the Quiagen mini-prep. method and is quantitated by agarose gel electrophoresis.

[0130] PCR is performed with the gene-specific primers under the conditions set forth above and transformant DNA is confirmed to contain the desired insert. If PCR-positive, one of the five plasmid DNA samples (500 ng) extracted from the E. coli XL1-blue cells is used to transform competent BL21 (λDE3) E. coli competent cells (Novagen; as described previously). Transformants (10) are picked onto selective kanamycin (50 μg/mL) containing LB agar plates and stored as a research stock in LB containing 50% glycerol.

[0131] 2.D. Purification of Recombinant Proteins

[0132] One mL of frozen glycerol stock prepared as described in 2.C. is used to inoculate 50 mL of LB medium containing 25 μg/mL of kanamycin in a 250 mL Erlenmeyer flask. The flask is incubated at 37° C. for 2 hours or until the absorbance at 600 nm (OD₆₀₀) reaches 0.4-1.0. The culture is stopped from growing by placing the flask at 4° C. overnight. The following day, 10 mL of the overnight culture are used to inoculate 240 mL LB medium containing kanamycin (25 μg/mL), with the initial OD₆₀₀ about 0.02-0.04. Four flasks are inoculated for each ORF. The cells are grown to an OD₆₀₀ of 1.0 (about 2 hours at 37° C.), a 1 mL sample is harvested by centrifugation, and the sample is analyzed by SDS-PAGE to detect any leaky expression. The remaining culture is induced with 1 mM IPTG and the induced cultures are grown for an additional 2 hours at 37° C.

[0133] The final OD₆₀₀ is taken and the cells are harvested by centrifugation at 5,000× g for 15 minutes at 4° C. The supernatant is discarded and the pellets are resuspended in 50 mM Tris-HCl (pH 8.0), 2 mM EDTA. Two hundred and fifty mL of buffer are used for 1 L of culture and the cells are recovered by centrifugation at 12,000× g for 20 minutes. The supernatant is discarded and the pellets are stored at −45° C.

[0134] 2. E. Protein Purification

[0135] Pellets obtained from 2.D. are thawed and resuspended in 95 mL of 50 mM Tris-HCl (pH 8.0). Pefabloc and lysozyme are added to final concentrations of 100 μM and 100 μg/mL, respectively. The mixture is homogenized with magnetic stirring at 5° C. for 30 minutes. Benzonase (Merck) is added at a 1 U/mL final concentration, in the presence of 10 mM MgCl₂, to ensure total digestion of the DNA. The suspension is sonicated (Branson Sonifier 450) for 3 cycles of 2 minutes each at maximum output. The homogenate is centrifuged at 19,000× g for 15 minutes and both the supernatant and the pellet are analyzed by SDS-PAGE to detect the cellular location of the target protein in the soluble or insoluble fractions, as is described further below.

[0136] 2.E.1. Soluble Fraction

[0137] If the target protein is produced in a soluble form (i.e., in the supernatant obtained in 2.E.) NaCl and imidazole are added to the supernatant to final concentrations of 50 mM Tris-HCl (pH 8.0), 0.5 M NaCl, and 10 mM imidazole (buffer A). The mixture is filtered through a 0.45 μm membrane and loaded onto an IMAC column (Pharmacia HiTrap chelating Sepharose; 1 mL), which has been charged with nickel ions according to the manufacturer's recommendations. After loading, the column is washed with 50 column volumes of buffer A and the recombinant target protein is eluted with 5 mL of buffer B (50 mM Tris-HCl (pH 8.0), 0.5 M NaCl, 500 mM imidazole).

[0138] The elution profile is monitored by measuring the absorbance of the fractions at 280 nm. Fractions corresponding to the protein peak are pooled, dialyzed against PBS containing 0.5 M arginine, filtered through a 0.22 μm membrane, and stored at −45° C.

[0139] 2.E.2. Insoluble Fraction

[0140] If the target protein is expressed in the insoluble fraction (pellets obtained from 2.E.), purification is conducted under denaturing conditions. NaCl, imidazole, and urea are added to the resuspended pellet to final concentrations of 50 mM Tris-HCl (pH 8.0), 0.5 M NaCl, 10 mM imidazole, and 6 M urea (buffer C). After complete solubilization, the mixture is filtered through a 0.45 μm membrane and loaded onto an IMAC column.

[0141] The purification procedures on the IMAC column are the same as described in 2.E.1., except that 6 M urea is included in all buffers used and 10 column volumes of buffer C are used to wash the column after protein loading, instead of 50 column volumes.

[0142] The protein fractions eluted from the IMAC column with buffer D (buffer C containing 500 mM imidazole) are pooled. Arginine is added to the solution to final concentration of 0.5 M and the mixture is dialyzed against PBS containing 0.5 M arginine and various concentrations of urea (4 M, 3 M, 2 M, 1 M, and 0.5 M) to progressively decrease the concentration of urea. The final dialysate is filtered through a 0.22 μm membrane and stored at −45° C.

[0143] Alternatively, when the above purification process is not as efficient as it should be, two other processes may be used as follows. A first alternative involves the use of a mild denaturant, N-octyl glucoside (NOG). Briefly, a pellet obtained in 2.E. is homogenized in 5 mM imidazole, 500 mM sodium chloride, 20 mM Tris-HCl (pH 7.9) by microfluidization at a pressure of 15,000 psi and is clarified by centrifugation at 4,000-5,000× g. The pellet is recovered, resuspended in 50 mM NaPO₄ (pH 7.5) containing 1-2% weight/volume NOG, and homogenized. The NOG-soluble impurities are removed by centrifugation. The pellet is extracted once more by repeating the preceding extraction step. The pellet is dissolved in 8 M urea, 50 mM Tris (pH 8.0). The urea-solubilized protein is diluted with an equal volume of 2 M arginine, 50 mM Tris (pH 8.0), and is dialyzed against 1 M arginine for 24-48 hours to remove the urea. The final dialysate is filtered through a 0.22 μm membrane and stored at −45° C.

[0144] A second alternative involves the use of a strong denaturant, such as guanidine hydrochloride. Briefly, a pellet obtained in 2.E. is homogenized in 5 mM imidazole, 500 mM sodium chloride, 20 mM Tris-HCl (pH 7.9) by microfluidization at a pressure of 15,000 psi and clarified by centrifugation at 4,000-5,000× g. The pellet is recovered, resuspended in 6 M guanidine hydrochloride, and passed through an IMAC column charged with Ni++. The bound antigen is eluted with 8 M urea (pH 8.5). Beta-mercaptoethanol is added to the eluted protein to a final concentration of 1 mM, then the eluted protein is passed through a Sephadex G-25 column equilibrated in 0.1 M acetic acid. Protein eluted from the column is slowly added to 4 volumes of 50 mM phosphate buffer (pH 7.0). The protein remains in solution.

[0145] 2.F. Evaluation of the Protective Activity of the Purified Protein

[0146] Groups of 10 OF1 mice (IFFA Credo) are immunized rectally with 25 μg of the purified recombinant protein, admixed with 1 μg of cholera toxin (Berna) in physiological buffer. Mice are immunized on days 0, 7, 14, and 21. Fourteen days after the last immunization, the mice are challenged with H. pylori strain ORV2001 grown in liquid media (the cells are grown on agar plates, as described in 2.A., and, after harvest, the cells are resuspended in Brucella broth; the flasks are then incubated overnight at 37° C.). Fourteen days after challenge, the mice are sacrificed and their stomachs are removed. The amount of H. pylon is determined by measuring the urease activity in the stomach and by culture.

[0147] 2.G. Production of Monospecific Polyclonal Antibodies

[0148] 2.G.1. Hyperimmune Rabbit Antiserum

[0149] New Zealand rabbits are injected both subcutaneously and intramuscularly with 100 μg of a purified fusion polypeptide, as obtained in 2.E. 1. or 2.E.2., in the presence of Freund's complete adjuvant and in a total volume of approximately 2 mL. Twenty one and 42 days after the initial injection, booster doses, which are identical to priming doses, except that Freund's incomplete adjuvant is used, are administered in the same way. Fifteen days after the last injection, animal serum is recovered, decomplemented, and filtered through a 0.45 μm membrane.

[0150] 2.G.2. μMouse Hyperimmune Ascites Fluid

[0151] Ten mice are injected subcutaneously with 10-50 μg of a purified fusion polypeptide as obtained in 2.E. 1. or 2.E.2., in the presence of Freund's complete adjuvant and in a volume of approximately 200 μL. Seven and 14 days after the initial injection, booster doses, which are identical to the priming doses, except that Freund's incomplete adjuvant is used, are administered in the same way. Twenty one and 28 days after the initial infection, mice receive 50 μg of the antigen alone intraperitoneally. On day 21, mice are also injected intraperitoneally with sarcoma 180/TG cells CM26684 (Lennette et al., Diagnostic Procedures for Viral, Rickettsial, and Chlamydial Infections, 5th Ed. Washington D.C., American Public Health Association, 1979). Ascites fluid is collected 10-13 days after the last injection.

### EXAMPLE 3

### Methods for producing transcriptional fusions lacking His-tags

[0152] Methods for amplification and cloning of DNA encoding the polypeptides of the invention as transcriptional fusions lacking His-tags are described as follows. Two PCR primers for each clone are designed based upon the sequences of the polynucleotides that encode them (see the attached sequence listing). These primers can be used to amplify DNA encoding the polypeptides of the invention from any Helicobacter pylori strain, including, for example, ORV2001 and the strain deposited as ATCC deposit number 43579, as well as from other Helicobacter species.

[0153] The N-terminal primers are designed to include the ribosome binding site of the target gene, the ATG start site, and any leader sequence and cleavage site. The N-terminal primers can include a 5′ clamp and a restriction endonuclease recognition site, such as that for BamHI (GGATCC), which facilitates subsequent cloning. Similarly, the C-terminal primers can include a restriction endonuclease recognition site, such as that for XhoI (CTCGAG), which can be used in subsequent cloning, and a TAA stop codon.

[0154] Amplification of genes encoding the polypeptides of the invention is carried out using Thermalase DNA Polymerase under the conditions described above in Example 2. Alternatively, Vent DNA polymerase (New England Biolabs), Pwo DNA polymerase (Boehringer Mannheim), or Taq DNA polymerase (Appligene) can be used, according to instructions provided by the manufacturers.

[0155] A single PCR product for each clone is amplified and cloned into appropriately cleaved pET 24 (e.g., BamHI-XhoI cleaved pET 24), resulting in construction of a transcriptional fusion that permits expression of the proteins without His-tags. The expressed products can be purified as denatured proteins that are refolded by dialysis into 1 M arginine.

[0156] Cloning into pET 24 allows transcription of the genes from the T7 promoter, which is supplied by the vector, but relies upon binding of the RNA-specific DNA polymerase to the intrinsic ribosome binding sites of the genes, and thereby expression of the complete ORF. The amplification, digestion, and cloning protocols are as described above for constructing translational fusions.

### EXAMPLE 4

### Purification of the Polypeptides of the Invention by Immunoaffinity

[0157] 4.A. Purification of Specific IgGs

[0158] An immune serum, as prepared in section 2.G., is applied to a protein A Sepharose Fast Flow column (Pharmacia) equilibrated in 100 mM Tris-HCl (pH 8.0). The resin is washed by applying 10 column volumes of 100 mM Tris-HCl and 10 volumes of 10 mM Tris-HCl (pH 8.0) to the column. IgG antibodies are eluted with 0.1 M glycine buffer (pH 3.0) and are collected as 5 mL fractions to which is added 0.25 mL 1 M Tris-HCl (pH 8.0). The optical density of the eluate is measured at 280 nm and the fractions containing the IgG antibodies are pooled, dialyzed against 50 mM Tris-HCl (pH 8.0), and, if necessary, stored frozen at −70° C.

[0159] 4.B. Preparation of the Column

[0160] An appropriate amount of CNBr-activated Sepharose 4B gel (1 g of dried gel provides for approximately 3.5 mL of hydrated gel; gel capacity is from 5 to 10 mg coupled IgG/mL of gel) manufactured by Pharmacia (17-0430-01) is suspended in 1 mM HCl buffer and washed with a buchner by adding small quantities of 1 mM HCl buffer. The total volume of buffer is 200 mL per gram of gel.

[0161] Purified IgG antibodies are dialyzed for 4 hours at 20±5° C. against 50 volumes of 500 mM sodium phosphate buffer (pH 7.5). The antibodies are then diluted in 500 mM phosphate buffer (pH 7.5) to a final concentration of 3 mg/mL.

[0162] IgG antibodies are mixed with the gel overnight at 5±3° C. The gel is packed into a chromatography column and is washed with 2 column volumes of 500 mM phosphate buffer (pH 7.5), and 1 column volume of 50 mM sodium phosphate buffer, containing 500 mM NaCl (pH 7.5). The gel is then transferred to a tube, mixed with 100 mM ethanolamine (pH 7.5) for 4 hours at room temperature, and washed twice with 2 column volumes of PBS. The gel is then stored in 1/10,000 PBS/merthiolate. The amount of IgG antibodies coupled to the gel is determined by measuring the optical density (OD) at 280 nm of the IgG solution and the direct eluate, plus washings.

[0163] 4.C. Adsorption and Elution of the Antigen

[0164] An antigen solution in 50 mM Tris-HCl (pH 8.0), 2 mM EDTA, for example, the supernatant obtained in 3.E. or the solubilized pellet obtained in 3.E., after centrifugation and filtration through a 0.45 μm membrane, is applied to a column equilibrated with 50 mM Tris-HCl (pH 8.0), 2 mM EDTA, at a flow rate of about 10 mL/hour. The column is then washed with 20 volumes of 50 mM Tris-HCl (pH 8.0), 2 mM EDTA. Alternatively, adsorption can be achieved by mixing overnight at 5±3° C.

[0165] The adsorbed gel is washed with 2 to 6 volumes of 10 mM sodium phosphate buffer (pH 6.8) and the antigen is eluted with 100 mM glycine buffer (pH 2.5). The eluate is recovered in 3 mL fractions, to each of which is added 150 μL of 1 M sodium phosphate buffer (pH 8.0). Absorption is measured at 280 nm for each fraction; those fractions containing the antigen are pooled and stored at −20° C.

[0166] Other embodiments are within the following claims.

The application's sequence listing, which the Patent Office published only in electronic form, follows.

SEQUENCE LISTING (370 sequences)

SEQ ID NO: 1 - DNA, 265 bp, Helicobacter pylori
  CDS (51)...(212)
ttttttagtttgtttttgagtataatcctacgaaaattttaaggaacggcatggagtttttgggactgattttaagtctggccgctattttgatagcgtttaaaaagcctgaaaaagaaaattgggcgtttgggattttgatggtggtgtggttagtggagcttattatttttatagcccacagctctagcgttttgcctaacatgaatctataagggggatgcatggataaagaaacccgattttacaaccttttttctttggc

SEQ ID NO: 2 - protein, 54 aa, Helicobacter pylori
MEFLGLILSLAAILIAFKKPEKENWAFGILMVVWLVELIIFIAHSSSVLPNMNL

SEQ ID NO: 3 - DNA, 670 bp, Helicobacter pylori
  CDS (51)...(617)
cccatagacgacaaaatcaagcggttttatcaaaaccaaaaaactttagaatgaaaaaaattgctttcattttggctttatgggtgggcttgttaggggcgtttgagcctaaaaaaagtcatatttattttggggctatggtgggtttagctcctattaaaataaccccaaaaccggctagtgattcttcttatacggcttttttatggggggctaaaggagggtatcaattcgctttttttaaagctctagcgttaaggggtgaattttcctaccttatggcaatcaaacccaccgcactgcacacgattaacacttctttattgagcttaaatattgatgtgttaagcgatttttacacttacaaaaaatacagctttggggtgtatggggggcttgggatagggtatttttatcaaagcaaccatttaggcatgaaaaatagttcgtttatgggttataacggcttgtttaatgtggggcttggcagcacgatcgatcgccaccaccgcatagagcttggggctaaaatccctttttcaaagactagaaattcttttaaaaatccttattttttagagagcgtttttatccatgcgacttatagctatatgttttaagagagaatagcctattagtggtcgttatcaataagataagatccttaatg

SEQ ID NO: 4 - protein, 189 aa, Helicobacter pylori
MKKIAFILALWVGLLGAFEPKKSHIYFGAMVGLAPIKITPKPASDSSYTAFLWGAKGGYQFAFFKALALRGEFSYLMAIKPTALHTINTSLLSLNIDVLSDFYTYKKYSFGVYGGLGIGYFYQSNHLGMKNSSFMGYNGLFNVGLGSTIDRHHRIELGAKIPFSKTRNSFKNPYFLESVFIHATYSYMF

SEQ ID NO: 5 - DNA, 434 bp, Helicobacter pylori
  CDS (51)...(380)
agcgtgaaaaaaattgagttgaatcaaaacctgcattaaggattaaaagaatgctcaaaaaaagtttgttattgcttgtttttttagtcttacagcttagcggcgctgaagaaaacaatcaagccccaaaaaacacgccccctgaattaaaccccgctaacgctaagggcgcgccaaactctaacacccagatcacccctaaaaacgataactctaacctgttagacaaattaggttcgcctgaaaacgctcaaaccgagctttctgccggtattgatttggctaaaaagggcgattatcaaggggctttcaagcttttttcccaatcgtgcgataatggtaatgcggccgggtgttttgcaagtgggggcgatgtatgctaatggggtagggatccaaaccaacagattaaaagccgctcgctattatgaatg

SEQ ID NO: 6 - protein, 110 aa, Helicobacter pylori
MLKKSLLLLVFLVLQLSGAEENNQAPKNTPPELNPANAKGAPNSNTQITPKNDNSNLLDKLGSPENAQTELSAGIDLAKKGDYQGAFKLFSQSCDNGNAAGCFASGGDVC

SEQ ID NO: 7 - DNA, 575 bp, Helicobacter pylori
  CDS (73)...(522)
ccacaaaagcttaatgaatattaaattaaaaacatgttaatctttagttatttttaaaatttaggaaatcccatgcatcaaaacaataaaacttttttacccagccaatccgctcacctctctaaaatcattctttttttaaacaccggctttttagcctatctgttaagcgcttgtggggcgaatgtgcctatagaagaagtgttggttaaagatcctaaagagaccaaagcccaagaagtcgccagagaagaaaaggctatccagcaagaaaacgccactattgatgcgcgcaccacgcctttaatcaatcgtttcactaattatagcgcttatggctctttaaacggcttttacaattcagtggataatctcaattcgcccatgcaaaacgggatgtatggaggctattacatgccttattattacatgccctatggtttcatgccttatgggtcaggtcttatgccttatgggccttatgggtatggagcgcctggatacttcccttacgctttttattgattgagtggctttagaaagcgtggtggtgttggtgtttttactcaaacacg

SEQ ID NO: 8 - protein, 150 aa, Helicobacter pylori
MHQNNKTFLPSQSAHLSKIILFLNTGFLAYLLSACGANVPIEEVLVKDPKETKAQEVAREEKAIQQENATIDARTTPLINRFTNYSAYGSLNGFYNSVDNLNSPMQNGMYGGYYMPYYYMPYGFMPYGSGLMPYGPYGYGAPGYFPYAFY

SEQ ID NO: 9 - DNA, 910 bp, Helicobacter pylori
  CDS (51)...(860)
attatgttattattatacgaaatgtagacttttagaaggaaaaatgttgtatgaaaaagtttgtagtgtttaaaacgctctgtttatcggtagtgttaggtaatagtcttgtggcagcagaaggcagcacagaagtgcaaaagcaattggaaaagccaaaagagtataaagcagtgaaaggcgagaaaaacgcttggtatttggggattagctatcaagtcggtcaggcttcgcaaagcgttaaaaacccccccaaaagcagtgaatttaactaccctaagttccctgtgggtaaaaccgactatctggccgttatgcaaggcttagggcttactgtgggttataagcagtttttcggggaaaagagatggtttggtgcacgctattacggcttcatggattatgggcatgccgtatttggagcgaacgctttaacatcggataatggtggggtgtgtgagcttcaccaaccatgtgcgaccaaagtagggacaatgggcaatctgtctgacatgttcacttatggtgtgggtattgacactttatacaatgtcatcaataaagaagatgcgagttttggtttcttttttggggctcaaatcgcgggtaactcttggggtaatacgacaggggcctttttggaaactaaaagcccttataagcacacttcctatagccttgatccggcgattttccagttcctttttaatttagggatccgcacccatattggccggcatcaagaatttgactttggcgtgaagattcccactatcaatgtttattattttaaccatgggaatttgagcttcacttaccgccgtcaatacagcctttatgtggggtatcgttacaatttctgatttaaaacgcttgtttttctctaattgaattttcaattagagttttc

SEQ ID NO: 10 - protein, 270 aa, Helicobacter pylori
MKKFVVFKTLCLSVVLGNSLVAAEGSTEVQKQLEKPKEYKAVKGEKNAWYLGISYQVGQASQSVKNPPKSSEFNYPKFPVGKTDYLAVMQGLGLTVGYKQFFGEKRWFGARYYGFMDYGHAVFGANALTSDNGGVCELHQPCATKVGTMGNLSDMFTYGVGIDTLYNVINKEDASFGFFFGAQIAGNSWGNTTGAFLETKSPYKHTSYSLDPAIFQFLFNLGIRTHIGRHQEFDFGVKIPTINVYYFNHGNLSFTYRRQYSLYVGYRYNF

SEQ ID NO: 11 - DNA, 1357 bp, Helicobacter pylori
  CDS (58)...(1305)
cgcaattaaaaggaattttaactaaaatattgagtttaaatccacgatgagtttttaatgcaatataagaaaaataagaaaagatattattatttagcgttagggatcttttttttaaatggtctgtctttgaaagctttagaaatcgccgtcaaaccttttggctatctggggctattatataatcaaggggcgcaaaaaaaccctcacagctatgtgggggctttagcgcgtcttggggtggatttttcttatagcaacgggtggtcctttggtattggagcgattggggcttggaatatttataacaaacagcgtttggctaacctttatatcagtctagggaatttttttggtagttctaaaaatgttaaaccttatttgagcgctggcgatgtttctgatgcgtatgttcaatacactaaccagcgttttaaaatcgctttagggcgtttcaataccgattttgtggattttgattggatagggggcaatattcaaggggtttctgtagcttttaagcaaaattccatgcgttattttgggatttttatggatagcatgctttataatgggcatcaaatcaacaaagagcaagggaatcggatcgctacttccctaaacgctctagcgtcttatgaccctgtgtctaaacgcttgtatgtggggggggaagtgtttgttttaggtgcagaatacaggcatgaaaatcttaaagtggtgccttttattttaacggacacccgcttgcctttatccacccaaaatgttttagtgcaagtggggggtaagttggagtatgacgcttctttagctaagggtttcacttcgcacactctagtgcatggcatgtatcaatacggcaacactgatgcggctacaagcgttaaaaatgccggcttgtttttgatcgatcaaacttttaaatacaaaatttttaattttggaacgggtttttatatcgttccggcaagaaacaataagggctatctatggacttttaatgacaggactaaattctatggccgtgggatcaatgcgcccggcgtgccagcgatttattttgcaaactctagcatttcaggctatgtttttttagggcttaagactaaaagggtgcgtttagacgcgatggtggcttttggggattaccaagaatattctttaatgagcagttttagggtttggacttataggagtttgtcttttgatatgggtggggggtatgtgtatgcttacaattctaaagccacgagaaaaagtcttggaaatagttcttttgtcttttttgggaagtttttgttttaaaaaataccatttctacaatcaatagtgaagagtttgcaataaagtaagc

SEQ ID NO: 12 - protein, 416 aa, Helicobacter pylori
MQYKKNKKRYYYLALGIFFLNGLSLKALEIAVKPFGYLGLLYNQGAQKNPHSYVGALARLGVDFSYSNGWSFGIGAIGAWNIYNKQRLANLYISLGNFFGSSKNVKPYLSAGDVSDAYVQYTNQRFKIALGRFNTDFVDFDWIGGNIQGVSVAFKQNSMRYFGIFMDSMLYNGHQINKEQGNRIATSLNALASYDPVSKRLYVGGEVFVLGAEYRHENLKVVPFILTDTRLPLSTQNVLVQVGGKLEYDASLAKGFTSHTLVHGMYQYGNTDAATSVKNAGLFLIDQTFKYKIFNFGTGFYIVPARNNKGYLWTFNDRTKFYGRGINAPGVPAIYFANSSISGYVFLGLKTKRVRLDAMVAFGDYQEYSLMSSFRVWTYRSLSFDMGGGYVYAYNSKATRKSLGNSSFVFFGKFLF

SEQ ID NO: 13 - DNA, 1562 bp, Helicobacter pylori
  CDS (73)...(1509)
ttatgcttctttgtttttagatcagttaagaattgtagtctttaagatgtattggctattaaaaggaaaaaaatgaaaaatagcacgcctttaaagaatcaagttttttgtgggttatatgttttaagtttgagcgcttctttgcaagcgtttgattataaaattgaagtttcagcggagtccttttctaaagttggctttaataaaaaaaagattgatatagctagggggatttatcctacagagacttttgtaaccgctgtagggcagggcaatatctatgcggattttttacccaaaggccttaaagatcaagggcatgttttagagggaaaaatcggtggcacgctaggaggggtcgcttatgatagcacgaaattcaatcaaggcggatcggttatttataactacatcggttattgggatggctatttagggggtaaaagagccttgcttgatggcacgagtatccatgagtgcgcgcttggatctgatggcaaggtgattgattctatagcgtgcgggaacgctagggccaataaaatccgccgtaattacttgatgaataacgcttttttagaataccgctataaagatatttttttagctaagggagggcgttatcaatccaatgctccttatatgagcggttacacgcaaggctttgaaatcagcgctaaagtcaaggataaaaatgaaggaatccacaaattatggtggtttagctcatggggtagggcgttcgcttatggggagtggatttatgatttttattctccaagaaccgtggttaaaaacgggcgcactttgaattatggtatccatttagtgaattatacttatgaaagaaaaggggttagcgttagcccttttttccaattttcgcctgggacttattatagccctggggtggttgtaggctatgatagtaaccctaattttaacggcgttggctttagatccgaaacaaaagcttatattttgctccctgtccatgaccccttaagaagggatacttatcgttacgctataaaggctggcactgccgggcaaagcttgctcattaggcaacgatttgattacaatgaatttaattttgggggagcgttttataaagtatggaaaaacgcaaacgcttacatcggcacgacaggaaaccctttaggcattgatttttggaccaatagcgtttatgatatagggcaagctttaagccatgtggtaaccgctgatgccgtctctggttgggtttttggtgggggcgtgcataaaaagtggctgtgggggactttatggcgttggactagcggcactttagccaatgaagcgagtgcggctgttaatgtgggctataagatcagtaagagtttgacagcgagcgtgaaattagaatatttgggcgtgatgacgcatgcaggctttacggtagggagttacaggcccacgcccggctctaaagcgctttattcagacaggagtcatttgatgacaactcttagcgctaaattctaaccaatcgctttaagctgtttattaaagcgttaaaaatcccttaataaaaa

SEQ ID NO: 14 - protein, 479 aa, Helicobacter pylori
MKNSTPLKNQVFCGLYVLSLSASLQAFDYKIEVSAESFSKVGFNKKKIDIARGIYPTETFVTAVGQGNIYADFLPKGLKDQGHVLEGKIGGTLGGVAYDSTKFNQGGSVIYNYIGYWDGYLGGKRALLDGTSIHECALGSDGKVIDSIACGNARANKIRRNYLMNNAFLEYRYKDIFLAKGGRYQSNAPYMSGYTQGFEISAKVKDKNEGIHKLWWFSSWGRAFAYGEWIYDFYSPRTVVKNGRTLNYGIHLVNYTYERKGVSVSPFFQFSPGTYYSPGVVVGYDSNPNFNGVGFRSETKAYILLPVHDPLRRDTYRYAIKAGTAGQSLLIRQRFDYNEFNFGGAFYKVWKNANAYIGTTGNPLGIDFWTNSVYDIGQALSHVVTADAVSGWVFGGGVHKKWLWGTLWRWTSGTLANEASAAVNVGYKISKSLTASVKLEYLGVMTHAGFTVGSYRPTPGSKALYSDRSHLMTTLSAKF

SEQ ID NO: 15 - DNA, 810 bp, Helicobacter pylori
  CDS (98)...(757)
ctaatatttattttaaactttgttattatttaaggtgtgatttgattttagtctgtatggggcaagtgtggggcaggataacataaggaattgggttatgaataaaacaacggttaaaatattaatgggcatggcgttattatcatcgcttcaagccgcagaggcagagcttgatgaaaaatcaaaaaaacctaaatttgcggacaggaatacattttatttaggggttgggtatcaacttagtgcgatcaacacatcttttagcaccgagtctgtagataaatcgtattttatgaccggcaatggctttggtgtggtgttaggggggaaatttgtggctaaaacgcaagctgtagagcatgtgggtttccgttacgggttgttttatgatcagaccttttcttctcacaaatcctatatttctacctatggtttagaatttagcggtttgtgggacgctttcaattcgccaaagatgtttttagggttagagtttggcttaggcatcgctggggcgacttatatgccaggaggggctatgcatgggattatcgctcaaaatttaggcaaagaaaattcgcttttccaattgcttgtgaaagtgggttttcgttttggctttttgcacaatgaaatcactttcgggttgaaattccctgtcattcctaacaaaagaacggaaatcattgatggcttgagcacgactactttatggcaccgcttaccggtagcttatttcaattatatctataatttttagatatggttatttagaggttttagatttgacaaaatcaatcaactctcgtg

SEQ ID NO: 16 - protein, 220 aa, Helicobacter pylori
MNKTTVKILMGMALLSSLQAAEAELDEKSKKPKFADRNTFYLGVGYQLSAINTSFSTESVDKSYFMTGNGFGVVLGGKFVAKTQAVEHVGFRYGLFYDQTFSSHKSYISTYGLEFSGLWDAFNSPKMFLGLEFGLGIAGATYMPGGAMHGIIAQNLGKENSLFQLLVKVGFRFGFLHNEITFGLKFPVIPNKRTEIIDGLSTTTLWHRLPVAYFNYIYNF

SEQ ID NO: 17 - DNA, 1516 bp, Helicobacter pylori
  CDS (51)...(1463)
tttatctttaaaagtatttgcatttatcaatctcattttaggaggcatgcatgaaaaaggcaagtcaggttttattctttggggcatttttaagctcttctttgcaaggttttgaagctaagctcaacggctttgtggatcaatccagcactatcggttttaaccagcataaaatcaataaagaaagaggtatctaccctatgcagcaattcgcaacgattgcgggctatttagggcttggttttagcctgttacccaaaaaggtttcagaccatgttctaaaaggcaaaataggaggcatggtgggatctattttctatgatggcacgaagaagtttgaagacagctctgtagcttacaacctctttggttattatgatgggttcatggggggttatacaaacatcttacaaagcgatgatttagcgacacaaaacatgaaatacaataaaaatgtccgcaactatgtctttagcgacgcgtatttagaatacgcttataagaattattttgaaataaaagccgggcgctatttatccactatgccttataaaagcggtcaaacgcaaggctttcaaatttctgggcaatacaagaaagcgcgcttgacttggtttagctcttttgggagggcgttcgcttacggctcgtttttgatggattggtttgccgctaggaccacttatagcggaggttttaccaaaaacgataagggaggttatgatagccatgggcgaaaggtgctttatggcacgcatgcggtgcaactcacctataaacctcatcgtttcctcatagaaggcttttattacctttcgcctcaaatctttaacgctccgggcgttaagattggttgggattctaaccctaattttagcggcacaggctttcgctctgatacagctatcatagggtttttccccatttactacccttggatgatcgttaaatccaatggaagcccggtctataaatacgacacgcctgccactcaaaatgggcaaaacctcattatcctccaacgctttgacatcaacaattacaatgtttccatcgctttttataaagtctttcaaaacgctaatggttggataggcaacatggggaatccaagcggtgtgatcatggggagtaacagcgtctatgcgggttttacaggcacagcccttaaaagagatgccgctaccattttcctttcttgtggcggcactcattttgccaaaaaattcacatggaaattcgccacgcaatactccaattcagtggtttcttgggaagcgagagcgatgatctctttaggttataaattcactgaatacttgagcggtagcgtggatcttgcatattatggcgtgtatactaacaaaggatttaaaccgggtgaaaacgggcctgtgcctaaagacttccccgccctttattctgacaggagcgcgttatacacggctctagtagcatctttttgatgctaccctatgattatggtgggcgtcttttgatgctgtttctctagtct

SEQ ID NO: 18 - protein, 471 aa, Helicobacter pylori
MKKASQVLFFGAFLSSSLQGFEAKLNGFVDQSSTIGFNQHKINKERGIYPMQQFATIAGYLGLGFSLLPKKVSDHVLKGKIGGMVGSIFYDGTKKFEDSSVAYNLFGYYDGFMGGYTNILQSDDLATQNMKYNKNVRNYVFSDAYLEYAYKNYFEIKAGRYLSTMPYKSGQTQGFQISGQYKKARLTWFSSFGRAFAYGSFLMDWFAARTTYSGGFTKNDKGGYDSHGRKVLYGTHAVQLTYKPHRFLIEGFYYLSPQIFNAPGVKIGWDSNPNFSGTGFRSDTAIIGFFPIYYPWMIVKSNGSPVYKYDTPATQNGQNLIILQRFDINNYNVSIAFYKVFQNANGWIGNMGNPSGVIMGSNSVYAGFTGTALKRDAATIFLSCGGTHFAKKFTWKFATQYSNSVVSWEARAMISLGYKFTEYLSGSVDLAYYGVYTNKGFKPGENGPVPKDFPALYSDRSALYTALVASF

SEQ ID NO: 19 - DNA, 377 bp, Helicobacter pylori
  CDS (87)...(323)
  misc_feature 309: n = A,T,C or G
aaatttatgttataattaaacgcattgtaaataaattctcattttgatacatttttacaataaaacattactttaaggaacatcttatgaaaaaaacgaaaaaaacgattctgctttctctaactctcgcggcgtcattgctccatgctgaagacaacggcgtttttttaagcgtgggttatcaaatcggtgaagcggttcaaaaagtgaaaaacgccgacaaggtgcaaaaactttcagacacttatgaacaattaagccggcttttaaccaacgataatggcacaaactcaaagacaagcgcgcaanatcaaccaagcggttaataatttgaacgaacgcgcaaaaactttagccggtgggacaaccaattcccc

SEQ ID NO: 20 - protein, 79 aa, Helicobacter pylori
  VARIANT 75: Xaa = Any Amino Acid
MKKTKKTILLSLTLAASLLHAEDNGVFLSVGYQIGEAVQKVKNADKVQKLSDTYEQLSRLLTNDNGTNSKTSAQXQPSG

SEQ ID NO: 21 - DNA, 2169 bp, Helicobacter pylori
  CDS (60)...(2039)
ccctatcatagggcgtggcatgaagaaaaaagcaaaagtcttttggtattgttttaatcatgatttattggttgtatttggcggtcttttttttgttgagcgcattagacgctaaagaaatcgctatgcaacgatttgacaaacaaaaccataagatttttgaaatccttgcggataaagtgagcgctaaagacaatgtgataaccgcatcagggaatgcgatcttattgaattatgatgtgtatattctagcggacaaggtgcgttatgacactaaaaccaaagaagcgttattagaggggaatatcaaggtttataggggcgagggtttgctcgttaaaaccgattacgtgaaattgagtttgaatgaaaaatatgaaatcattttccccttttatgtccaagacagcgtgagcgggatttgggtgagcgcggatattgccagcggaaaggatcaaaaatataaggttaaaaacatgagcacttcagggtgcagcattgataaccccatttggcatgtcaatgcgacttcaggctcattcaacatgcaaaaatcgcatttgtctatgtggaatcctaagatctatgtcggtgatattcctgtattgtatttgccctatattttcatgtccacgagcaataaaagaactactgggtttttataccctgagtttggcacttccaacttagacggctttatttatttgcaacccttttatttagcccccaaaaactcatgggatatgacctttaccccacaaatccgctataaaaggggttttggcttgaattttgaagcgcgctacattaactctaaaaacgacaggtttttattcaacgcgcgctattttaggaattacacccaatatgtcaaacgctacgatttgaggaatcaaaatatctacgggtttgaatttttaagctctagcagggacactttacaaaaatacttccaccttaagtctaatattgacaacgggcattacattgactttttatacatgaacgatttggactatgtgcgttttgaaaaggttaataagcgtatcacagacgccacgcacatgtctagggcgaattactatttgcaaacagaaaacaattattacggcttgaatatcaagtattttttaaacctgaataaaatcaacaataaccgcactttccaatctgtccctaatttgcaataccataaatatttaaattctttgtattttagaaatttgttgtattcggtggattatcagtttagaaacaccgcaagagagattggttatggctatgtgcaaaacgctttgaatgtgccggtgggcttgcaattttctttgtttaaaaagtatttgtctttagggctttggaatgatctccaactatctaatgtggctttaatgcaatctaaaaattccttcgtgcctacgatccctaatgaatcaagggaatttgggaattttgtgtcttcaaatttttccatgtatgtcaatacggatttggctagagaatacaacaagcttttccacacgatccaactagaagcgattttcaacatcccttattacacctttaaaaacggcttattttctcaaaacatgtatgctttaagcgcgcaagccttaaacagctacacttcgcctttattgagagattatgattatcaagggcgtttgtatgactcggtgtggaatcctagcagtattttacctagcaatgcgagcaacaagacggtggatttaaccctaacgcaatacctttatggcttaggggggcaagagttattgtattttaaaatatcgcaactcatcaatcttgacgataaagtttcgccctttagaatgccactagagagcaagatcgggttttcgcccttaacgggattgaacatctttgggaatgtcttttattcgttttatcaaaaccgcttagaagaaatctctgtgaacgccaattaccaacgcaagtttttaagctttaacctctcttattttttaaaaaacaattttagcagtgggattaatagcattgtagaaaatctgcggattatttaaaggcgggttttagcaacgactttggctatttttccatgagcgcggatgtgggttatgatattagaaacaatgtggttttaaattggaatgtggggatttataaaaaaatccgttgttttgggattgg

SEQ ID NO: 22 - protein, 660 aa, Helicobacter pylori
MIYWLYLAVFFLLSALDAKEIAMQRFDKQNHKIFEILADKVSAKDNVITASGNAILLNYDVYILADKVRYDTKTKEALLEGNIKVYRGEGLLVKTDYVKLSLNEKYEIIFPFYVQDSVSGIWVSADIASGKDQKYKVKNMSTSGCSIDNPIWHVNATSGSFNMQKSHLSMWNPKIYVGDIPVLYLPYIFMSTSNKRTTGFLYPEFGTSNLDGFIYLQPFYLAPKNSWDMTFTPQIRYKRGFGLNFEARYINSKNDRFLFNARYFRNYTQYVKRYDLRNQNIYGFEFLSSSRDTLQKYFHLKSNIDNGHYIDFLYMNDLDYVRFEKVNKRITDATHMSRANYYLQTENNYYGLNIKYFLNLNKINNNRTFQSVPNLQYHKYLNSLYFRNLLYSVDYQFRNTAREIGYGYVQNALNVPVGLQFSLFKKYLSLGLWNDLQLSNVALMQSKNSFVPTIPNESREFGNFVSSNFSMYVNTDLAREYNKLFHTIQLEAIFNIPYYTFKNGLFSQNMYALSAQALNSYTSPLLRDYDYQGRLYDSVWNPSSILPSNASNKTVDLTLTQYLYGLGGQELLYFKISQLINLDDKVSPFRMPLESKIGFSPLTGLNIFGNVFYSFYQNRLEEISVNANYQRKFLSFNLSYFLKNNFSSGINSIVENLRII

SEQ ID NO: 23 - DNA, 454 bp, Helicobacter pylori
  CDS (51)...(401)
tcaaggtgtgccaaacatgccttgaaactcaatttttgaatctcaattttatgaaaggatttgttatgagtggattaaaagcatttagttgtgtagtggttttatgcggtgcaatggctaatacggctatagctggtcctaaaatagaagcaaggggtgagtttggcagattttgggggggagctgttggtggtgcaattgggggtggtgttggtggtgcagtggggggagctgttggtggtcctgcgggtggttgggctggcagattagttggtggttctgtggggagagagtttggtcgggaaataggcgatagggtagaagattacatccgtggcgttgatagagagccacaagccccaagagaacccacctatgatcgtcatttcgtgtatgacaggtagctttgggcgagaaaggagagagcatgaatgtcaaaaatcgtttgagcgat

SEQ ID NO: 24 - protein, 117 aa, Helicobacter pylori
MKGFVMSGLKAFSCVVVLCGAMANTAIAGPKIEARGEFGRFWGGAVGGAIGGGVGGAVGGAVGGPAGGWAGRLVGGSVGREFGREIGDRVEDYIRGVDREPQAPREPTYDRHFVYDR

SEQ ID NO: 25 - DNA, 856 bp, Helicobacter pylori
  CDS (59)...(802)
gccattttaagctaatataatatagagcgattatcaaaaaataaagggaaaagactgaatgttgaaaagaatgatattattaggggctttgggtgttttagcgagcgctgaagagagtgcggcttttgtgggagtcaattaccaggtgagcatgatacaaaatcagactaaaatggtgaatgacaacggcttgcaaaagcctttgataaagtttccgccttacgcaggagcgggttttgaagtgggctataagcaattttttggtaagaaaaaatggtttggcatgcgttattatgggttttttgactacgcgcacaaccgctttggcgtgatgaaaaagggcattccggtgggcgatagtgggtttatttacaatagttttagttttggagggaacactttaacggaaagggattcctatcaggggcaatactatgtcaatttattcacttatggcgtggggttagatacgctgtggaattttgtgaataaagaaaacatggtttttggttttgtggtggggatccaattagcgggggatagttgggcaacgagcatcagtaaagaaatcgctcattatgcaaaacaccacagcaattccagttatagcccggccaatttccagtttttatggaagtttggggtccgcacccatatcgctaaacacaatagcctagaattagggattaaagtgcctacgatcacacaccagcttttctctcttaccaacgaaaagggatacaccttacaggctgatgtgcgtagagtttatgcgtttcaaatcagttacttgagggatttttaacccctttttagatacaatcacgcctgaaactatccatttaaaggtgtgaaa

SEQ ID NO: 26 - protein, 248 aa, Helicobacter pylori
MLKRMILLGALGVLASAEESAAFVGVNYQVSMIQNQTKMVNDNGLQKPLIKFPPYAGAGFEVGYKQFFGKKKWFGMRYYGFFDYAHNRFGVMKKGIPVGDSGFIYNSFSFGGNTLTERDSYQGQYYVNLFTYGVGLDTLWNFVNKENMVFGFVVGIQLAGDSWATSISKEIAHYAKHHSNSSYSPANFQFLWKFGVRTHIAKHNSLELGIKVPTITHQLFSLTNEKGYTLQADVRRVYAFQISYLRDF

SEQ ID NO: 27 - DNA, 2750 bp, Helicobacter pylori
  CDS (69)...(2699)
taataataaccttaggtttaaaacttgactaaatttttagaaaaaagtaaataaaaaggctaaaagaaatgcttagaaatcaatttcgtatcgtgtttgtctcttgtattgtcgctagcaatttgcaagctcaagaaacaacccacactttgggtaaggtaaccactaagggtgaaaggacttttgaatacaacaataaaatgtatattgacagaaaagagctccaacaacgccaaagtaaccaaatccgtgatatttttaggactagagcggatgtgaatgtggccagtgggggcttgatggcgcaaaagatctatgttagggggattgagagccgtctcttaagggtaacaatagatggcgtcgcccaaaatggtaacattttccaccatgacgctaacaccgtgatcgatcctaacatgattaaagaagtggaagtgatcaagggggcggcgaacgcttcagcaggcccaggtgcggtggcgggtaaattgtctttcaccacgattgacgctaacgacttcttaagaaagaatcaaacttatggcgctaaagcggaagcggccttttataccaacttcgggtatcgcatgaacgccactgcggcttaccgggggaaaaactgggacatcctagcctattacaaccatcaaaatattttttactacagagacgggaacaacgcttttaggaatgtcttccaccctaactacgatttacaagatccaagcaatagcgatatgagcgtagggactcccagtgaagtcaatagcgttttagctaaaattaatggctatatcaacgaaacagacagcattagcgtgagctacaacctcacacgagacaattctacaaggcttttacgccctaacaccacttcagccctctctaaagccaatgacccaggaagccagccagccccctttgtgattgactttgggaaagaattagcccatacgatcaacttcaaccacaatttgagcttgaaatacaagcatgaaggcggccctaattttaaccagccgcgcgttgaatccaccgcctttttaggggtaagggggggcaattataaccctgtggtgaatcctttcgcttacaattctaacgagccggctaacccagattatatccctgaagtgaaagagtggtgtaataacccagataatatcagccagtgcacgcaaggggctatcaggccttctaatggaggctatcaaataggctatggcacgcctaattctattaattggcaagggactagcgattctagtggaggggcgcaagcagggtatgggcagcttaacgctatttctacaagcgcgaacgtttatcatgggcttgtccctaaaaatcctgattatgacatgaccccccctaacgctcaaaaccctagcgcaaacgattggactttagggaatgcggacgctgaggggactttagccagaaggatttttttaatcaactcgggcgttaattttaaagtaacccaccccattagcgaagattatgggaatgtgtttgaatacggcatgatttatcaaaacctgagcgttttctctggattggataaaggcaaaaacggctattataaaaacaacattgatcctaacgaccctaacgggccgggcttgccttaccgccattactacaccgatcaaagctcccaatacccccaaaatctcaacacccctaacccgctctatcgtaacatgccccaaaattcgcatgcgatcggcaatatcatcggagggtttatgcaagcaaactacaacattttaagcaatgtgatcgtgggtgcgggaactcgttatgatatttacaccttgctagacaaaaacggccgcacgcatgtaacttctggtttctcgccttctgcaaccgtgctttataaccccattgaaagcattggcttgaaagtgagttatgcgtatgtaactaagggggctttgcctggcgatggcgttttgatgcgcgatcctacggtgatttatcaaaggaatttgcgccctgcgatcggtcaaaatgtggaatttaatgtggatttcaacagcaagtatttcaatgtgcgcggggcagcgttctatcaagtcatcaataatttcatcaacagctacgggcaagacacttctaaaaatggagggggtaacgcaaccgcaaaaaacatgtcagggaatttacccgaaaccattaacatttatggttatgaagtttcagggaatgtgaggtataagaatttcttagggactttctcagtggctcgctcttggccaacggctagggggcatttattagcggacacttacgctctagctgcaacgactgggaatgtgtttattttaaaagccgattatgatgttcgcaggtgggggcttactttaacctggctctcgcgctttgtaactaacatgtattatgagggctattctatctattacccgcaatacggcttgatcaaaatccataaacccgggtatggcgtgcataatgtctttatcaactggactccgccttctaaaaaatggcagggtttaaggatttcagccgtgtttaataatatcttaaacaagcaatatgtggatcaaacttctgtgtttcaagcgagcgcggacgctccagcgagcgatatgatccctaaaggtaagcgcatggcgctcccggctcctggatttaacgcgcgttttgaggtatcctatcagttctaaaatgaaaggaatcttaggatttctttttgaattttgaacatggaaaca

SEQ ID NO: 28 - protein, 877 aa, Helicobacter pylori
MLRNQFRIVFVSCIVASNLQAQETTHTLGKVTTKGERTFEYNNKMYIDRKELQQRQSNQIRDIFRTRADVNVASGGLMAQKIYVRGIESRLLRVTIDGVAQNGNIFHHDANTVIDPNMIKEVEVIKGAANASAGPGAVAGKLSFTTIDANDFLRKNQTYGAKAEAAFYTNFGYRMNATAAYRGKNWDILAYYNHQNIFYYRDGNNAFRNVFHPNYDLQDPSNSDMSVGTPSEVNSVLAKINGYINETDSISVSYNLTRDNSTRLLRPNTTSALSKANDPGSQPAPFVIDFGKELAHTINFNHNLSLKYKHEGGPNFNQPRVESTAFLGVRGGNYNPVVNPFAYNSNEPANPDYIPEVKEWCNNPDNISQCTQGAIRPSNGGYQIGYGTPNSINWQGTSDSSGGAQAGYGQLNAISTSANVYHGLVPKNPDYDMTPPNAQNPSANDWTLGNADAEGTLARRIFLINSGVNFKVTHPISEDYGNVFEYGMIYQNLSVFSGLDKGKNGYYKNNIDPNDPNGPGLPYRHYYTDQSSQYPQNLNTPNPLYRNMPQNSHAIGNIIGGFMQANYNILSNVIVGAGTRYDIYTLLDKNGRTHVTSGFSPSATVLYNPIESIGLKVSYAYVTKGALPGDGVLMRDPTVIYQRNLRPAIGQNVEFNVDFNSKYFNVRGAAFYQVINNFINSYGQDTSKNGGGNATAKNMSGNLPETINIYGYEVSGNVRYKNFLGTFSVARSWPTARGHLLADTYALAATTGNVFILKADYDVRRWGLTLTWLSRFVTNMYYEGYSIYYPQYGLIKIHKPGYGVHNVFINWTPPSKKWQGLRISAVFNNILNKQYVDQTSVFQASADAPASDMIPKGKRMALPAPGFNARFEVSYQF

SEQ ID NO: 29 - DNA, 370 bp, Helicobacter pylori
  CDS (51)...(317)
tttaaaatcacccgttacagcatcactgaaatcactaataggggtgattgatgcgtaaggttttatacgctcttgtgggctttttgttggcttttagcgctttaaaagccgatgattttttagaagaagcgaacgaaacagccccggcgcatttaaaccaccctatgcaggatttaaacgccattcaagggagcttttttgacaaaaaccgctcaaaaatgtccaacactttgaacattgattactttcaagggcaaacttataaaatcccgcttgcgttatgcgatggcgmccttattgtttttttcaaaacccattagcgattttgttttaggggataaggtgggttttgatgcgaaaattttagaaa

SEQ ID NO: 30 - protein, 89 aa, Helicobacter pylori
  VARIANT 81: Xaa = Any Amino Acid
MRKVLYALVGFLLAFSALKADDFLEEANETAPAHLNHPMQDLNAIQGSFFDKNRSKMSNTLNIDYFQGQTYKIPLALCDGXLIVFFKTH

SEQ ID NO: 31 - DNA, 357 bp, Helicobacter pylori
  CDS (51)...(305)
atgcaataaaaaaagaaattcttaggatttctcacattaaggagttttaaatgaaaaaggtttttttaggtatggcattagcctttagtgtgtccatggcagaaaaaagtggcgcgtttttaggaggggggtttcaatattctaatttagaaaaccaaaacaccacccgcaccccaggcgctaacaataacaccccgatagacacttcaatgtttggcagcaacaaaacagctccagcccaagaaacgcaaagcgcttccaaaccggacactaaagtcaatccaagcgcaagttggatgaaaaaataagaaggaagttatgaaaaagtcattcaaaaaattaggctttgtctcttta

SEQ ID NO: 32 - protein, 85 aa, Helicobacter pylori
MKKVFLGMALAFSVSMAEKSGAFLGGGFQYSNLENQNTTRTPGANNNTPIDTSMFGSNKTAPAQETQSASKPDTKVNPSASWMKK

SEQ ID NO: 33 - DNA, 961 bp, Helicobacter pylori
  CDS (51)...(908)
gaatgtagcatttagaactcaagtagagaaaatgtagaaggaaggaatacatgaagaaatctgttatagtaggtgctatctctctagcaatgacaagcttattgtcagcagagacccctaagcaagaaaaagctattaagactagccctaccaaaaaaggtgaaagaaatgctgcttttatagggattgattaccagttgggtatgctcagcactaccgctcaaaattgttcccatgggaattgcaatggtaatcaaagtggggcttacggctctaatacgcctaacatgcctacagcgtcaaacccaacaggagggtttactcatggcgctctagggactcgtgggtataaaggcttaagcaaccaacaatacgctatcaatggttttggttttgttgtagggtataagcattttttcaagaaatccccgcaatttggaatgcgttattacggattctttgattttgcaagctcttattataagtattacacttataatgattatggcatgagagacgctcgcaagggttctcaaagtttcatgtttggctatggggctggcacagatgtgttgtttaacccggctattttcaatcgtgagaacttgcattttgggtttttcttgggcgttgcgatcggtggcacctcttggggtccaacaaactattattttaaggacttggctgatgagtatagagggagtttccacccatcaaatttccaggtcttagttaatggtgggattcgcttaggcactaaacaccaaggttttgaaattggcttgaaaatccaaaccatccgcaacaattactacaccgctagtgcggataatgtgcctgaagggactacttatagattcactttccaccgcccctatgccttttattggcgttacattgtaagcttttaaggtgttttagggctaatcttatgggggcatagaaaagggcttttgctctt

SEQ ID NO: 34 - protein, 286 aa, Helicobacter pylori
MKKSVIVGAISLAMTSLLSAETPKQEKAIKTSPTKKGERNAAFIGIDYQLGMLSTTAQNCSHGNCNGNQSGAYGSNTPNMPTASNPTGGFTHGALGTRGYKGLSNQQYAINGFGFVVGYKHFFKKSPQFGMRYYGFFDFASSYYKYYTYNDYGMRDARKGSQSFMFGYGAGTDVLFNPAIFNRENLHFGFFLGVAIGGTSWGPTNYYFKDLADEYRGSFHPSNFQVLVNGGIRLGTKHQGFEIGLKIQTIRNNYYTASADNVPEGTTYRFTFHRPYAFYWRYIVSF

SEQ ID NO: 35 - DNA, 289 bp, Helicobacter pylori
  CDS (51)...(236)
gggattttatttcttatagcagaaattatttttaaagtaaaagacaaatcatgtttagagatatagtagatattttaatatctgttgttattattggattagtattaacagctattagagctactataatggcgtttaaaggcgatactgatgatgatgaagttgagagtgatgggttttttagtagaatatgggataaattcgttgaatatttcggctatactctagttactatataatgttttttccttatataattggaccagttatcgctttaatttttatattt

SEQ ID NO: 36 - protein, 62 aa, Helicobacter pylori
MFRDIVDILISVVIIGLVLTAIRATIMAFKGDTDDDEVESDGFFSRIWDKFVEYFGYTLVTI

SEQ ID NO: 37 - DNA, 1544 bp, Helicobacter pylori
  CDS (52)...(1491)
gacacacattagttatagtttctaagagagttctccccctatctcttagatatgcctttttgtatttttattttaatatctttgggagttagggttttggaaattaagaaatatttttcttactctctattttttttgcttttttctagtctctttttatccaaacttcaagcttataaattcaacatgagcattgttggaaaggtgagcagctataccaagtttggctttaacaaccaaagataccagccttctaaagacatttatcctacaggtagctacacttctttactcggcgaattgaatttgagcatgggtttatacaagggtttgagagcggaagtgggggctatgatggcagcgctcccctatgactctaccgcctatcaaggcaacaatatccctaacggccagcccggctctaggaccgatccttttggggcgggtatcttttggcaatatattggttggtatgcggggcatagtggtttgcaagtgcaaaaacctcgtttagccatggtgcataacgcttttttgagctacaactacaaaaaagacaaattcagttttggcgtgaaaggggggcgctatgacgctgaagagtatgattggttcacttcttacactcaaggggttgaaggctttgtcaaatataaagacaccagattcagggtgatgtattcagacgctagggcttcagcgtcaagcgactggttttggtattttgggcgttactatacaagcggtaaggctctaatggtagctgatttgaaatatgaaaaagacaacctaaaaatcaacccttatttttatgcgatctttcaaagaatgtatgcgccaggcattaatatcacttatgacaccaaccctaatttcaacaataagggttttcgttttgtaggcactttcgtagggtttttccccatttttgccactccggctaatcaaaatgatattatcctcttccaacaagtgccattaggcaagagtgggcaaacttatttcttccgcactcgtttttactataataagtggcaatttgggggcagcgtctataaaaacatcggtaacgctaatggtgatataggtatttatggcgaccctttggggtataacatttggacgaatagtatttatgacgcagaaattaacaatattgttggcgctgatgttattaacgggtttttgtatgtaggctcacaatatagagggtttagttggaaaattttaggccgttggacggatagcccaagggctgatgaaaggagtctcgcgctctttttgagttatttttctaataagtataatattagaatggatttaaaactagaatattatggcaatatcaccaaaaaaggctattgtattgggtattgtggcatgtatgttccagtcgatcctaacgggcctgggacacagcctttaacgcacaatgtgtattctgacaggagccatataatgtttaacattgcttacggttttaggatttactagcattttatccttaatggatatttttgattagcctttttaaaatattgaaa

SEQ ID NO: 38 - protein, 480 aa, Helicobacter pylori
MPFCIFILISLGVRVLEIKKYFSYSLFFLLFSSLFLSKLQAYKFNMSIVGKVSSYTKFGFNNQRYQPSKDIYPTGSYTSLLGELNLSMGLYKGLRAEVGAMMAALPYDSTAYQGNNIPNGQPGSRTDPFGAGIFWQYIGWYAGHSGLQVQKPRLAMVHNAFLSYNYKKDKFSFGVKGGRYDAEEYDWFTSYTQGVEGFVKYKDTRFRVMYSDARASASSDWFWYFGRYYTSGKALMVADLKYEKDNLKINPYFYAIFQRMYAPGINITYDTNPNFNNKGFRFVGTFVGFFPIFATPANQNDIILFQQVPLGKSGQTYFFRTRFYYNKWQFGGSVYKNIGNANGDIGIYGDPLGYNIWTNSIYDAEINNIVGADVINGFLYVGSQYRGFSWKILGRWTDSPRADERSLALFLSYFSNKYNIRMDLKLEYYGNITKKGYCIGYCGMYVPVDPNGPGTQPLTHNVYSDRSHIMFNIAYGFRIY

SEQ ID NO: 39 - DNA, 658 bp, Helicobacter pylori
  CDS (51)...(605)
aattttaggttattagttaccattttattattcttaaggatgtgtttataatgagaattaaggcttattttttgcgttttatcgcgctggttttgattgttttgttaggttttagtgcttgtaaaaattctcaaaaatctcaagattctcaaaacaataccccccaacaagatagccctaaaacctacaccgctatggatttgaataaccaagaatacaccatcacaggcgatttagattctctcaatatcagcccggattccaacacccctaccctattagttttaagcgctttagataattctttaaaagattacgcccccagctttaacatcttaaaaaaaacttttaaagatcgtttgagggtgcttattttactcaataaaccctattcaagcgatgcaatcaaagactttagcgcgcattttcaagctgatttgatgattttaaaccctaaagataccgctctttttgatcatttaaagtatgacgctttaaaccattcttttaacatgctcttataccacaaacaccaattgatcaaaatgtatcaagggatcgtgccaatagaaatgctccaatttgatatttccaatttaaaggattaaaaaaaaccatgtttaattttttcaaaaaaattgtcaataaaattaagggt

SEQ ID NO: 40 - protein, 185 aa, Helicobacter pylori
MRIKAYFLRFIALVLIVLLGFSACKNSQKSQDSQNNTPQQDSPKTYTAMDLNNQEYTITGDLDSLNISPDSNTPTLLVLSALDNSLKDYAPSFNILKKTFKDRLRVLILLNKPYSSDAIKDFSAHFQADLMILNPKDTALFDHLKYDALNHSFNMLLYHKHQLIKMYQGIVPIEMLQFDISNLKD

SEQ ID NO: 41 - DNA, 460 bp, Helicobacter pylori
  CDS (51)...(407)
aatcccttcaaaaatgatataatagacttgatgaactcattttaaggaaaatgcccatgcgtttgcacactgccttttttggtattaattcattgcttgttgcctctcttttgataagcggttgcagtctctttaaaaagcgtaacactaacgcccagctaatccccccttcagctaatggcttgcaagcccccatttatcccccaaccaatttcacccctagaaagagcattcagcctctcccaagccctcgccttgagaataacgatcagcccgtcattagttctaaccccactaacgctatccctaacacccccattctcacgcctaataatgtcattgaattgaacgcatgggcatgggcgtggctccagaatccaccatttcaccctctcaagccctggctctagccaagcgggcggctatcgttgatggctaccgccagttgggtgaaaaaatg

SEQ ID NO: 42 - protein, 119 aa, Helicobacter pylori
MPMRLHTAFFGINSLLVASLLISGCSLFKKRNTNAQLIPPSANGLQAPIYPPTNFTPRKSIQPLPSPRLENNDQPVISSNPTNAIPNTPILTPNNVIELNAWAWAWLQNPPFHPLKPWL

SEQ ID NO: 43 - DNA, 1285 bp, Helicobacter pylori
  CDS (51)...(1232)
gttgtgattttattgtgttttcatatcaattttcatatcaaggagtttaaatgaaagaaacaagacttttaaaattgagagcgttgagcttagcatgtttaatgggattaggcgtgagtgggtgcgcgtttttagataagcaaatcttaaacgaccatttgactaaagctaaaaataacccaaaatacgattgccaaaaagaaatgtggtctttccctaaaaaatacgatgggataaatcagtgtttaaaggctcaagaagagcttattgaaccaatcatcactaaaaagatcgatcagtatcaatgcgatgatttcactaatgaaggcttaaaagataagtgtttcaaaagaaacgatgcctacttaaacacccttttaacgcccatcattcaaaaacaagagcgtcgttttagctgctctgatttccataacccagagctaaaagaacaatgcatggataaaactaacgcttatgaaaagcaaaaagaccgacaaaaaagactaattaatctcgtgcaattagaagcgtttgaaaaagaatacgcgcaatataaaccatacattatcccttacttcaccaaagaatgcgttaaaaatgcgccccatttagccaacaaggaaagactatgccaaaaagaagtgcatgaaaaatttgacgacccttattctagctctaaagaattgagcgttcaatcggctatttctttttgcattaaaaaagttgatgctaaattagaaaaagccgctcttatgaatggcgtttatataagcccttataaaaaatccacccattgccaaagaacgcatttggaaaataagagcttgaaagaaatcgctttaaatatgaaccctaaattagaaaagcaaagcccttttattgatgcggataaaatggctatgcaatctgcggggttattgagaaagaataaaggtgtcttgattgcttttgctacagatatttgcatggagcgtaacgaacataaaaaagaagagtttatcagccttaaagatagttgcacccaatcgcaagccaaaatctataacaacaaggagcgctttgacaaattcatacaagattaccaaaaagacttaaaaacttgtcttttagacacttctaacactaaagaagaagtggagcaaaatttttcacaatgccaaaaagagcaattgagagatgataacaaaggcttgggtttcactttagaagaattggttaaaaaatacgctaagtaaagttatttaattttatggatggttttaaaaatccattccatagttattgt

SEQ ID NO: 44 - protein, 394 aa, Helicobacter pylori
MKETRLLKLRALSLACLMGLGVSGCAFLDKQILNDHLTKAKNNPKYDCQKEMWSFPKKYDGINQCLKAQEELIEPIITKKIDQYQCDDFTNEGLKDKCFKRNDAYLNTLLTPIIQKQERRFSCSDFHNPELKEQCMDKTNAYEKQKDRQKRLINLVQLEAFEKEYAQYKPYIIPYFTKECVKNAPHLANKERLCQKEVHEKFDDPYSSSKELSVQSAISFCIKKVDAKLEKAALMNGVYISPYKKSTHCQRTHLENKSLKEIALNMNPKLEKQSPFIDADKMAMQSAGLLRKNKGVLIAFATDICMERNEHKKEEFISLKDSCTQSQAKIYNNKERFDKFIQDYQKDLKTCLLDTSNTKEEVEQNFSQCQKEQLRDDNKGLGFTLEELVKKYAK

SEQ ID NO: 45 - DNA, 835 bp, Helicobacter pylori
  CDS (84)...(704)
ttgatcattcttatttcgcacaacccaagcacgctaaaattagccactaagcatgtgaaattagagcatgggcgtttgacagaatgctaagggttttaagcgttggtgttgcttttattttactagggtgtcagtttttcaacaaaacgacgctgcatttaaaatataaagattaccccaaaaatagcgctttaaaaaccgctttcactttaaccccccctaaaatcttttttaacgcccgttttgtgccgcccttttaccaaaaagaatttaaaaaagcgatcacccaacaaatcgcttattttttaaaagataaaagtgcttttattctcaatgtttcaggcaatgtttttttttcttttgaagagaatcctaaagatttaaaagccattaaagaaaggcttaaaaagacgattgagcctaacgctgacccaaaagccgtcatgcgttttttaaaccttcaagcgagcttgattttagaatgcgtcccgcaaaccacttgcccgtttgacacccttttaatccccaccgctttcagcgtgcctgtttattacgctaatcgtttgggcgataacccctctcttttttcccaagaggataaaacctatcataacgctttgatcaaagcccttaataaggcttactattctcttatggagggtttagaaaagcgtttgaacgctataaaaaatgcagagtggctttaaggcatgaaaaagattgcattttttatttttgtcattttgttttcggtagggatttatttaatttggcatgttttattggaaaaagccctagaattgaaattagcaacctcagctaatgatttgctttt

SEQ ID NO: 46 - protein, 207 aa, Helicobacter pylori
MLRVLSVGVAFILLGCQFFNKTTLHLKYKDYPKNSALKTAFTLTPPKIFFNARFVPPFYQKEFKKAITQQIAYFLKDKSAFILNVSGNVFFSFEENPKDLKAIKERLKKTIEPNADPKAVMRFLNLQASLILECVPQTTCPFDTLLIPTAFSVPVYYANRLGDNPSLFSQEDKTYHNALIKALNKAYYSLMEGLEKRLNAIKNAEWL

SEQ ID NO: 47 - DNA, 763 bp, Helicobacter pylori
  CDS (51)...(710)
aaaaaataaccatgagttattcaaaaatttaactttataagacaggtggcatgcgtttaaaacattttaaaactttcctttttatcacaatggcaatcattgtaataggtaccggttgcgcgaacaaaaagaaaaaaaaagacgaatacaacaaaccggcgatcttttggtatcaagggattttgagagaaatcctttttgctaatttagaaacagcggacaattactattcttctttacaaagcgaacacatcaattccccccttgtcccagaagcgatgctagctttagggcaagcgcacatgaaaaagaaagagtatgttttagcgtctttttactttgatgaatacatcaagcgctttgggactaaggacaatgtggattatttgacttttttaaaattgcaatcgcattattacgctttcaaaaaccattctaaagaccaggaatttatctctaattctattgtgagtttaggcgaatttatagaaaaataccctaacagccgttaccgcccctatgtagaatacatgcaaatcaaattcattttagggcaaaatgagctcaatcgcgcgatcgcgaatgtctataaaaaacgccacaagcctgagggcgtgaaacgctatttagaaaggatagatgagactttagaaaaagagactaaacccaaaccatcgcacatgccttggtatgtgttaatttttgattggtaggatatttcaaaaccatacacattataacagagagatgaaaaatgactgaa

SEQ ID NO: 48 - protein, 220 aa, Helicobacter pylori
MRLKHFKTFLFITMAIIVIGTGCANKKKKKDEYNKPAIFWYQGILREILFANLETADNYYSSLQSEHINSPLVPEAMLALGQAHMKKKEYVLASFYFDEYIKRFGTKDNVDYLTFLKLQSHYYAFKNHSKDQEFISNSIVSLGEFIEKYPNSRYRPYVEYMQIKFILGQNELNRAIANVYKKRHKPEGVKRYLERIDETLEKETKPKPSHMPWYVLIFDW

SEQ ID NO: 49 - DNA, 801 bp, Helicobacter pylori
  CDS (75)...(749)
gaaaaaggctctgctttgatagataaatttgacgctaacccctataaaacgatttttggagaaaggaaataatcatgagagctacggcgataaaaatcttttcactctcatcagcattagccctattgcttcatggttgcttgagcatcaatttaaaacaaatgctaccagagatcagaacttacgatttgaatgcgagttcttttgaaatcacgcaatgcgctaaacctttgactgaagtgaggctcattagtattttgagcgcggatttattcaacactaaagagatcgtttttaaagccaaagacgggcagatcacgcatgggaagcaccaaaaatggatagacttgcctcgcaacatgctaaaaaccatgttcatgcaagaagcgcaaaaagcatgcttaggcgtggctttgcctccttatggcgcgggtgcacccacttatgcggttcgttttacgattttatcgttttctcttttagaaaaagaaaattctacctatagggcggaatttgcactaggctatgacattagcgtgaaaggcgattcgcattctggggtgatcattaagcatgaaaatatttctagcttggaaaataaaacgaccaaaacgagtaaaaatggcaatcaagattttcaagaaagcgcgatacaatctctccaacatgtaagcgtgcaagcgattcaagaagcggtttctttgattaaaaaagccattgaagcgcaaagcgtaagcccgttaaaaaaataaaaaataaggaggaattgtttgattttacgattggctggagcaagcgttt

SEQ ID NO: 50 - protein, 225 aa, Helicobacter pylori
MRATAIKIFSLSSALALLLHGCLSINLKQMLPEIRTYDLNASSFEITQCAKPLTEVRLISILSADLFNTKEIVFKAKDGQITHGKHQKWIDLPRNMLKTMFMQEAQKACLGVALPPYGAGAPTYAVRFTILSFSLLEKENSTYRAEFALGYDISVKGDSHSGVIIKHENISSLENKTTKTSKNGNQDFQESAIQSLQHVSVQAIQEAVSLIKKAIEAQSVSPLKK

SEQ ID NO: 51 - DNA, 448 bp, Helicobacter pylori
  CDS (51)...(395)
ttttatgataagatagtcaaattatacattgacttaaggaaatttaattgatgaaatctaaaatcactcattttatcgctatctcttttgttttaagcctgtttagcgcatgcaaagacgagcctaaaaaatcgtctcaatcgcaccaaaacaacactaaaatcactaaaaacaatccaatcaatcaagcgaataatgatataagaaaaattgagcatgaagaagaagatgaaaaagccaccaaagaagtgaacgatttgatcaataacgaaaataaaattgatgaaatcaataatgaagaaaacgctgatccttcgcaaaaaagaacgaacaacgttttgcaacgagccactaaccaccaagacaatctcaattccccactcaacaggaagtattaaagtgtgaaacttttttcaaaggatttatttaaaaaagtaacccctttatt

SEQ ID NO: 52 - protein, 115 aa, Helicobacter pylori
MKSKITHFIAISFVLSLFSACKDEPKKSSQSHQNNTKITKNNPINQANNDIRKIEHEEEDEKATKEVNDLINNENKIDEINNEENADPSQKRTNNVLQRATNHQDNLNSPLNRKY

SEQ ID NO: 53 - DNA, 1121 bp, Helicobacter pylori
  CDS (121)...(1065)
ctatcaagtcagtatttccaatatccaattagccaatgatctcaaagattctaatatttttatccaccagcgtttaatcatccccaccaacaaaaaattactcgctacaagggaattttaatgggtttggcgttggaaaaagtttgttttttaggcgttatttttttgattagcgcttgcacggttaaaaaagagggggtaaagaatttgtcttacaagcatgaaagcttgcgcgcttatgaaaacgctaaagattatgatccgacaaccaaaaaagccgcctataaacgcaatttttttgaacgccatttcaaacgctactccgattcgcaagatagcaacacaaaagatcagccactagataacggcatgcgcgattctagctcgatccaaagagccaccatgcgcccttatcaagtggggggcaagtggtattaccccactaaagtggatttaggcgaaaaatttgatggcgttgcgagttggtatggccctaacttccatgccaaaaaaaccagtaatggggaaatttataacatgtatgcccacaccgccgcgcacaaaactttacccatgaacaccgtggtgaaagtcatcaatgttgataataacttaagcaccattgtgcgcatcaacgatagagggccttttgtgagcgatcgcatcattgatttgtctaatgcggccgctagggatattgacatggttaaaaaaggcacagccagcgtgcgtctcattgttttgggctttggtggggttatctccacgcaatacgaacaatcctttaacgccagctcttcaaagatcttgcacaaggaatttaaagtcggcgagagcgaaaaaagcgtgagcggagggaaattttctttgcaaatgggggcttttagaaaccaaataggtgctcaaactttagcggataaattgcaagcagaaaatccaaattacagcgtcaaggttgcttttaaagacgatttgtataaagttttagttcaagggtttcaaagcgaagaagaggctagggattttatgaaaaaatacaaccagaatgcggttttaacgagagaatgattaagttattgcttttagatgtggatggcacgctcacagacggatcgttgtat

SEQ ID NO: 54 - protein, 315 aa, Helicobacter pylori
MGLALEKVCFLGVIFLISACTVKKEGVKNLSYKHESLRAYENAKDYDPTTKKAAYKRNFFERHFKRYSDSQDSNTKDQPLDNGMRDSSSIQRATMRPYQVGGKWYYPTKVDLGEKFDGVASWYGPNFHAKKTSNGEIYNMYAHTAAHKTLPMNTVVKVINVDNNLSTIVRINDRGPFVSDRIIDLSNAAARDIDMVKKGTASVRLIVLGFGGVISTQYEQSFNASSSKILHKEFKVGESEKSVSGGKFSLQMGAFRNQIGAQTLADKLQAENPNYSVKVAFKDDLYKVLVQGFQSEEEARDFMKKYNQNAVLTRE

SEQ ID NO: 55 - DNA, 811 bp, Helicobacter pylori
  CDS (51)...(761)
tataataaggaaattctaaacgaaaattaaactgaatgaaaggagtttgaatgaaaaaaatcgttttagtagcgatagccttattgatgagcgcttgcgcgagctataagatcacgcctgaacatgttacttcctataataatgggattcaagtgatgacttccacgcaagccaaatctaaagtccagctagaaatcgctcaaagcaagttgaaaggcttgaacgagtcccccttagtgctgtatgtagcggcgcaagttatagagggaagtcctgtggtgtttagccgtaaagccatttcagtgtctatcaaccaaacgaatttaccggtcttaagcctgagacaggtgatgaaatccagttttgattttgagggtattttacaaagttttaatatcgccgtgccgaccacccctattgataatgtcaatatgatcaccccgcctatgttttattacgggcaagggggatttttagcttataacggcatgatgtatgggggaatgggcatgtatgggccaggctttggcatgatgatgatggatgatgtagaagagcaagaagtcatgcaagaaagccgccaagctttaaaaatcctagcgatcaattaccttaaaaacaacacccttaatgttgagagtaaggctaagggagggtttgtggtggtggataccaaaaaccttaaaaccccgggtgtggtggtggttaaagtctttttagaagatgaaatccacacctttaaaattgatatttctaagatgtaatcgccccctttaataaaagcctttgggccatccacctaaaggttttt

SEQ ID NO: 56 - protein, 237 aa, Helicobacter pylori
MKKIVLVAIALLMSACASYKITPEHVTSYNNGIQVMTSTQAKSKVQLEIAQSKLKGLNESPLVLYVAAQVIEGSPVVFSRKAISVSINQTNLPVLSLRQVMKSSFDFEGILQSFNIAVPTTPIDNVNMITPPMFYYGQGGFLAYNGMMYGGMGMYGPGFGMMMMDDVEEQEVMQESRQALKILAINYLKNNTLNVESKAKGGFVVVDTKNLKTPGVVVVKVFLEDEIHTFKIDISKM

SEQ ID NO: 57 - DNA, 1425 bp, Helicobacter pylori
  CDS (97)...(1371)
taaaaaaaactacccttaaaaaaatcaatctaaaattcttaaattaaaatatagctataatacactaaaacaatctcaaggtttcaaaatttagccatgcgtcttcttctgttcaatcaaaacgcttttttattagcgtgcatgtttgtttcaagcgtgtatgtgaacgctgtcttagacgcttatgcaattgaaaacccctatatttctatcacactcacaagcctattagcccctttaagcatgctagcgtttttaaaaacccctagaaatagtgcttttgctttggggttttttgtgggggcgttattgttttattggtgcgctttaagctttcgctactcggatttcacttatttattgcccttaatcattgttttaatagcgttagtttatggggttttattttatttgttgctctattttgaaaacccctatttcaggcttttgagttttttaggctctagttttatccacccctttggatttgattggttagtcccagatagctttttttcttatagcgtgtttagagtggataaattatcgctagggcttgtttttttggcttgcatttttttgagcactaaaccattgaaaaaatataggatcataggggttttattgttacttggcgcgttggattttaatggtttcaaaacaagcgatttaaaaaaggttggaaatattgaattagtctctacaaaaacgccccaagatttgaaatttgactcaagttaccttaatgatattgaaaacaacattcttaaagaaatcaagctcgctcaaagcaagcaaaaaaccttgattgtttttccagaaaccgcctaccccatcgctttagaaaactccccctttaaagcgaagctagaagatttaagcgataatattgctattttaatagggacattacggactcaaggctataatctttataacagctcgtttttattttctaaagaaagcgttcagatcgctgataaagtaattttagccccctttggcgagaccatgcctttaccggaatttcttcaaaaaccccttgaaaagctcttttttggcgagagcacttatttataccgcaatgctcctcatttcagcgattttacattagacgattttacttttcgccccctgatttgctatgaaggcacttccaaacccgcttattcaaacagcccttcaaaaatttttatcgtgatgagcaataacgcatggtttagcccaagcattgaacccaccttacaaagaacgcttttaaaatactacgcaaggcgttatgataagatcatcttgcacagcgcgaacttttcaacttcttacatcttaagccctagtttattaggcgatattctttttaggaaacgatcatgattaaagcgattaatatttctcatgcttttgaaaagcctctttataatggcg

SEQ ID NO: 58 - protein, 425 aa, Helicobacter pylori
MRLLLFNQNAFLLACMFVSSVYVNAVLDAYAIENPYISITLTSLLAPLSMLAFLKTPRNSAFALGFFVGALLFYWCALSFRYSDFTYLLPLIIVLIALVYGVLFYLLLYFENPYFRLLSFLGSSFIHPFGFDWLVPDSFFSYSVFRVDKLSLGLVFLACIFLSTKPLKKYRIIGVLLLLGALDFNGFKTSDLKKVGNIELVSTKTPQDLKFDSSYLNDIENNILKEIKLAQSKQKTLIVFPETAYPIALENSPFKAKLEDLSDNIAILIGTLRTQGYNLYNSSFLFSKESVQIADKVILAPFGETMPLPEFLQKPLEKLFFGESTYLYRNAPHFSDFTLDDFTFRPLICYEGTSKPAYSNSPSKIFIVMSNNAWFSPSIEPTLQRTLLKYYARRYDKIILHSANFSTSYILSPSLLGDILFRKRS

SEQ ID NO: 59 - DNA, 766 bp, Helicobacter pylori
  CDS (51)...(713)
tgtagtaagatacctagttttcaaatctattaaaagataaaggttattacatgttttcactttcttatgtttccaagaaatttttaagcgttttattattgatttcgctgtttttaagcgcttgcaaatccaacaataaagacaagttagacgaaaatcttttaagctctggctctcaaagctccaaagaattaaacgatgagcgagacaatatagacaaaaagagttacgctggtttagaagatgttttttcagacaataagtccattagtcctaacgataaatacatgcttttagtttttggccgtaatggttgctcctattgcgaaaggtttaaaaaagatctcaaaaatgtcaaagaattgcgcgactacattaaagagcattttagcgcttactatgtcaatatcagctactccaaagagcatgattttaaagtcggcgataaaaataatgaaaaagaaatcaaaatgtccacagaagaattagcgcaaatttatgccgtccaatccacccctacgattgttttatccgataaaaccggcaaaaccatctatgaattgcccggctatatgccctctacgcaatttttagccgtgttagaatttatcggcgatgggaagtatcaagacacaaaagacgatgaggatctcactaaaaaattaaaggcttacatcaagtataaaaccaacctttctaaaagcaagtctaactaggaaagcctaatgaagaatctcaaaagcctgctttcttttttgctggcttc

SEQ ID NO: 60 - protein, 221 aa, Helicobacter pylori
MFSLSYVSKKFLSVLLLISLFLSACKSNNKDKLDENLLSSGSQSSKELNDERDNIDKKSYAGLEDVFSDNKSISPNDKYMLLVFGRNGCSYCERFKKDLKNVKELRDYIKEHFSAYYVNISYSKEHDFKVGDKNNEKEIKMSTEELAQIYAVQSTPTIVLSDKTGKTIYELPGYMPSTQFLAVLEFIGDGKYQDTKDDEDLTKKLKAYIKYKTNLSKSKSN

SEQ ID NO: 61 - DNA, 980 bp, Helicobacter pylori
  CDS (53)...(931)
tgaatgaaatcctagattctaacgccattgtatattatctcgctaaaaattcatgagattgttattcttgttattgagtgctgcttttatgttactggctgaagaaaaaatatctttaaacgatgacgcccccattaaactagtgcattggcaaaatgcattaaaagaagtccaacctgattcaaacgctccagcaacaccacctataaaagccgtgcaaaccacgctcacttttgaaacgccttttaacaaaacgcctaaaatcatggaagttgaagggcaaaaggtgatcgtcttaaaaaacgctaaactggattctaaaaaaaccatggattttaaagaagcctctttgaatgctttagaaatgttttcctaccaaaatgacatctacctcttgtctaaaaaagctaaagtggaattagaaatccaagcttcaaacagcaaggataaaaaacggctccgctttctctttttacccaaaggttttcatttagccccaccgcctaacctgaaagaaaaatctcagcaaactaaccttgcacaaaaagacaccaacgagcaaccccaaagccctttaaacactctagagttaaaacccccactaaatttaagccatgcttataaggcgctagcggttattgctgccttactcttaatattgtatgtcatcaaaaaaaaaattgttcccacacaagggtctttttctgcaaaagattttaagttagaaattagcgttttgggtcgtgttgatgcgaaccataaaatcatttcaatagaaaccaataaggagcgttacttggtcttactaagcgataaatacggcctgcttttagacaaaataagcccaaaaacatctaaagaagaactgattaaagaagctgaaaataatataaagaattcaaaattaggaaatttatatgccggaaaattctaaactacaacctgctaagttagggaaaaattttgaccctgtggatcat

SEQ ID NO: 62 - protein, 293 aa, Helicobacter pylori
MRLLFLLLSAAFMLLAEEKISLNDDAPIKLVHWQNALKEVQPDSNAPATPPIKAVQTTLTFETPFNKTPKIMEVEGQKVIVLKNAKLDSKKTMDFKEASLNALEMFSYQNDIYLLSKKAKVELEIQASNSKDKKRLRFLFLPKGFHLAPPPNLKEKSQQTNLAQKDTNEQPQSPLNTLELKPPLNLSHAYKALAVIAALLLILYVIKKKIVPTQGSFSAKDFKLEISVLGRVDANHKIISIETNKERYLVLLSDKYGLLLDKISPKTSKEELIKEAENNIKNSKLGNLYAGKF

SEQ ID NO: 63 - DNA, 620 bp, Helicobacter pylori
  CDS (70)...(567)
ctagcgcgatctttggtctcacacaagctataacaagcttgagaatcgcataatatattcttgttctacatgctatcaccagcaactttcaaacaaataactctagcattaatcgcttcaagactaatcgttgtaatcctatatgcttttatctttattgttctctctttttatatgctcaatatcatcactattcttaattttaaagcgcttattttggggtttgttagtgttttttcaagcgcattgttttgtttttgcttggcaatttttgtagctagaatttttcaaaacgaacaaagcatcttaggattttgtaatatcatcaatctctatgcgctaatgtcttgtaatgtttttgttcctttagaatacctacctagtattggtcaattatttatcaaaacatctattttttactaccttaatcaacttctaatcaaagcttttcaagggattgatactatactggttttagcaacttcaacatttttcattattggtggcattattttatttttactaagcgctaatcgcatgttactaacaccaaaagaacgcatgcgttaaaggcttagtcccaccattgatttatttaatggctcaaaaaaggggtaagc

SEQ ID NO: 64 - protein, 166 aa, Helicobacter pylori
MLSPATFKQITLALIASRLIVVILYAFIFIVLSFYMLNIITILNFKALILGFVSVFSSALFCFCLAIFVARIFQNEQSILGFCNIINLYALMSCNVFVPLEYLPSIGQLFIKTSIFYYLNQLLIKAFQGIDTILVLATSTFFIIGGIILFLLSANRMLLTPKERMR

SEQ ID NO: 65 - DNA, 1405 bp, Helicobacter pylori
  CDS (50)...(1366)
attgatttcttttgggaagtggatttgaaaaacttaaaaagccattaacatgcaagttaaagaaaacaaacaactctgcttaatttcattaggttgctctaaaaatttggtggattcagaggtgatgttaggcaagctttataattacacgctcactaatgacgctaagagcgctgatgtgattttgatcaacacttgcgggtttattgaaagcgctaaacaagagagtatccaaaccattctcaacgccgccaaagacaaaaaagagggagcgattttgattgcgagcgggtgcttgagcgaacgctataaagatgaaatcaaagaattgatccctgaagtggatatttttaccggcgtgggggattatgacaagatcgatataatgattgctaaaaaacaaaaccagttcagcgagcaagtgtttttaagcgagcattacaacgcacgcatcatcacgggatcgagcgtgcatgcgtatgtgaaaatttctgagggttgcaatcaaaaatgttctttttgcgctatccctagctttaaggggaaattgcaaagcagggaattggactccattttaaaagaagtggaaaatctcgcgcttaaaggctatacggatatgacttttatcgctcaagactctagctcctttttatacgataaggggcaaaaagacggcttgatccagctcattagagcgattgataaacagcaagccttaaagagcgcgcgtattttatatctctacccctctagcaccacgctagagcttattggcgcgattgaaagttcgcccatttttcaaaattattttgacatgcccatccagcacatcagcgactccatgctcaaaaagatgcggcgcaactctagccaagcgcaccatttaaagcttttagatgccatgaagcaggttaaagaaagctttatcagaagcacgatcattgtagggcatccggaagaaaatgagagcgaatttgaagaattgagcgcgtttttagacgagttccagtttgatagattgaatatttttgctttcagcgctgaagaaaacacgcatgcctattctttagaaaaagtgcctaaaaaaaccatcaacgctcgcatcaaagccttgaataaaatcgctttaaagcaccaaaaccattcctttaaggctttgttgaataagcccattaaggcgttagtggaaaataaagagggcgagtatttttacaaagcaagggatctcagatgggcgcctgaagtggatggggaaatcttgatcaatgatagcgaactaaccacccccttaaaacccgggcattatacgattgcacctagcgaatttaaagataatatcctactcgctaaggttttaagccctttttaaaagttagccataaggctaaaagcacggctaaagcgt

SEQ ID NO: 66 - protein, 439 aa, Helicobacter pylori
MQVKENKQLCLISLGCSKNLVDSEVMLGKLYNYTLTNDAKSADVILINTCGFIESAKQESIQTILNAAKDKKEGAILIASGCLSERYKDEIKELIPEVDIFTGVGDYDKIDIMIAKKQNQFSEQVFLSEHYNARIITGSSVHAYVKISEGCNQKCSFCAIPSFKGKLQSRELDSILKEVENLALKGYTDMTFIAQDSSSFLYDKGQKDGLIQLIRAIDKQQALKSARILYLYPSSTTLELIGAIESSPIFQNYFDMPIQHISDSMLKKMRRNSSQAHHLKLLDAMKQVKESFIRSTIIVGHPEENESEFEELSAFLDEFQFDRLNIFAFSAEENTHAYSLEKVPKKTINARIKALNKIALKHQNHSFKALLNKPIKALVENKEGEYFYKARDLRWAPEVDGEILINDSELTTPLKPGHYTIAPSEFKDNILLAKVLSPF

SEQ ID NO: 67 - DNA, 1420 bp, Helicobacter pylori
  CDS (200)...(1366)
tgcgcgttatrtggttttgattgaaaagttaggcattaaagacagataatttttatcggttttagggtgtggcgagtttgtgttgaaagagcgtttgaaggccttttttagtgcggactctgttttcactttaatttttgcccttttctttctcacttcgtttaaaaaacctttaactcaagtcttgttgattgttttaatggtttttttgttttttaggtgttatttccaagcgtctttgaaagaaactttcgcaattaatcatttaaaaacaatgtcttttaaatggctcactctggcttttttgggcgtgtttttaagcatcttccctaacatgtttaacatgcatgatagccaaactttccgctacaatttattcgctctaaacatgtccttaacttatgcttgcggggcgttatgcttgctttttgccagttgcttaagaatcaaattgaatcaaaaaatccttttttacagcatggctgttgcaaatttcatcaacggcttgctctcattggtgcaaaaaatttattttaacatgcccagagcgcaagggtttagcacggttaaggagtatgtggttttagtgagcgtgtccattttaggctgttatatttatgcgctttattcgcacaatcaaaaagaaaaactttttttcacgctttctgtttttgtggggtttttagtcgttattttaagcgccacaaggagcgcgacaatcgcttttgttattacttttttaatcctttcttgctttattttatacgccaaaaaatcgctcaaaccattgggttatatggtggtcgtgagtcttattttgagcgctttgtatgtggggagtaacgctttagaaaaaaagggggcaatagagcaatctagagttcaaaatcaaagctttgaagaagatctgaaacgctacgctaaaaaggacgctgatagcagtatcggatggcgtttggagcgttggaaagaagccctaacggttttgcgtttaaggcccttttttggtatggccgctagcgagaaatgccagaggttagaagagattttatccttatcaaagtcttatagggccaaagatttgattctctgttatgaaagatacgacaatcaaatcattcacattttagccactagggggatcataggctttttgatctggctcttttttttattagttattgtaaagattttttggagcgggataaagcaaaactctttaatatcgttttttatactaatgacactcgccttttacctcatttttggcattgggtttgacccctttgatttcttcattacgggaagtttttttgtaggaatgatcatgatggctgtttttttaaaaaaagataaaagtgctttttagcatcaaggggtttgacattagtcaagcggtagtttcttgtgattcgttctt

SEQ ID NO: 68 - protein, 389 aa, Helicobacter pylori
MVFLFFRCYFQASLKETFAINHLKTMSFKWLTLAFLGVFLSIFPNMFNMHDSQTFRYNLFALNMSLTYACGALCLLFASCLRIKLNQKILFYSMAVANFINGLLSLVQKIYFNMPRAQGFSTVKEYVVLVSVSILGCYIYALYSHNQKEKLFFTLSVFVGFLVVILSATRSATIAFVITFLILSCFILYAKKSLKPLGYMVVVSLILSALYVGSNALEKKGAIEQSRVQNQSFEEDLKRYAKKDADSSIGWRLERWKEALTVLRLRPFFGMAASEKCQRLEEILSLSKSYRAKDLILCYERYDNQIIHILATRGIIGFLIWLFFLLVIVKIFWSGIKQNSLISFFILMTLAFYLIFGIGFDPFDFFITGSFFVGMIMMAVFLKKDKSAF

SEQ ID NO: 69 - DNA, 1252 bp, Helicobacter pylori
  CDS (89)...(1198)
aaaaaggaaatagcacgatgaaacctaaaggggatattagcgttaatatgctaatatagtagaacattatgactacaaaaagggtgatatgctgatctccatagcgtttttattggttttatatcttttgaattatagttctttcaggatgttgaaatcgtttttaaccttaaagaaaatctctcaatacgcttatttatggttttttatccttttgagcataggcgaggcggcttttgttttttatagaaatattatgcctagccatttgtttgttttgacttcagcgtgttcgtttgtgtcttttattatttttatcctttctttaagtttttacgggttttcctattccatagaaaaaatagattttttgcattcaaggcgtaaaagtttaaaaaactttttaaaattggggttttatctggcgttattagggtatttttggcgtgggttttatgaagggttggcccgccctaaaatcaaagaaacccctatttatttggataagctggataaagaattaaagattattttactcacagacatgcatgtggggagtttgttgcaaaaagattttgttgattacattgtagaagaagtcaatcaaaaagaagtggatatggtgctgattgggggggatttagtggatgaaagcattgaaaaagtcaaatcttttttactgcctttaaacaaccttaaaagcacgcatggcactttttatgtgccaggaaatcatgagtattatcatggcatagagccgattttatcgtttcttgacacgcttaatttgacgattttagggaatgagtgcgtgcatttaggggggatcaatttgtgcggcgtgtatgattatttcgcaaggaagcgtcaaaattttgcccctgatattgacaaagctttaaaaaagcgcaatgagagtaagcccacgatccttttggcccaccaacctaaacaaattagaagcctcaaagaaagccactctgtagatttagtcctttcagggcatacccatgcagggcaaatctttccctttagccttttagtcaagttggcgcaaacctatttacatggtttatacaagcacagccccaccactcaaatttatgtgagcagtggggcagggtattgggggattcctttaaggtttttagcccctagcgagatcgcataccttaggcttttacctaaaaatcaagcttagttaaacaaaatcttaaaatcttaatcgtaatcaagcggttaaaaataagaa

SEQ ID NO: 70 - protein, 370 aa, Helicobacter pylori
MLISIAFLLVLYLLNYSSFRMLKSFLTLKKISQYAYLWFFILLSIGEAAFVFYRNIMPSHLFVLTSACSFVSFIIFILSLSFYGFSYSIEKIDFLHSRRKSLKNFLKLGFYLALLGYFWRGFYEGLARPKIKETPIYLDKLDKELKIILLTDMHVGSLLQKDFVDYIVEEVNQKEVDMVLIGGDLVDESIEKVKSFLLPLNNLKSTHGTFYVPGNHEYYHGIEPILSFLDTLNLTILGNECVHLGGINLCGVYDYFARKRQNFAPDIDKALKKRNESKPTILLAHQPKQIRSLKESHSVDLVLSGHTHAGQIFPFSLLVKLAQTYLHGLYKHSPTTQIYVSSGAGYWGIPLRFLAPSEIAYLRLLPKNQA

SEQ ID NO: 71 - DNA, 431 bp, Helicobacter pylori
  CDS (103)...(381)
agtctttgcccgctatcaaaaaagagattttttgcaatattttcataagcaccgaagaaagcttgctttagcgagtttgtgggtgaaacgtacgccttgctcatgatttttgtcaataaatatctctatgggattaaaagcgttgtgcctttggcggttggttttagcaaataccctttaaaaaagtttttatggcttaatgttttttccagttttttgtgggcgctcatcgtggggagcgtttcttttcaagcgagcgattgggtgaaaacgctgtatgaaaggctttctcattacacttcgttttttatcataagttttgttcttatagcgcttttaatatggtttttattgaaacgatattcgcgcaaaatgggtttttaagcaagatgtttaattaaatgcgctagactacgcccacaagcattcgc

SEQ ID NO: 72 - protein, 93 aa, Helicobacter pylori
MIFVNKYLYGIKSVVPLAVGFSKYPLKKFLWLNVFSSFLWALIVGSVSFQASDWVKTLYERLSHYTSFFIISFVLIALLIWFLLKRYSRKMGF

SEQ ID NO: 73 - DNA, 1281 bp, Helicobacter pylori
  CDS (70)...(1227)
tagcatcaataccccttaaataaaagatataatgctgtattataagctagttttaattacaattttcaaatgttaaggaaaaacattttagcttactatggggcgaattttctcttaatcatcgctcaaagcttaccccatgcgattttaacccccttgttgctttctaaagggcttagtttgagtgaaatcttgctcgtgcaaaccttttttagcttttgcgtgctagtggctgaatacccaagcggcgttttagcggatttgatgagccgaaaaaatttattcctggtttctaatgcctttttaatcgctagtttttcgtttgtgctgttttttgatagctttattttcatgcttttagcgtgggggttgtatggtttgtatagcgcatgctctagcggcacgattgaagcttcactcatcacagacattaaggaaaacaaaaaagatttatccaagtttttagccaaaaacaatcaaattacttatttaggcatgattatagggagttctttgggatcgtttttgtatctcaaagtccatgcgatgctgtatattgtggggatttttttaatcatgctctgtgtgctaacgatcattttttattttaaagagaaagaaggggattttaaaagccaaaaaagcctgaaactccttaaagagcaagtcaaaggcagtcttaaagagcttaaagataaccccaaacttaaaattctgttagtggggcatttgattacgcccgtcttttttatgagccattttcaaatgtggcaagcgtattttttaaaacaaggcgttaaagagcaatacctttttgtgttttatatcgcttttcaagtgatttctattctcattcattttttaaaagcctctagttatagccaaaaaatcgccttgagttcgcttgtggtgttgttaggcgttagccccttattgcttagcaatatcccttattgtttcataggggtgtatgcgctcatggtggcgtttttcacttacatgagctattgcttaaactatcaattctccaaattcgtttctaaaaacaacatttcctcgctctcatcgcttttatcaagctgtgtgcgcgtggtctctgtgctaatcttatcgctcagcagtctggaactgcgttacttctcacccctaactatcataaccatgcattttgccttgacgcttatcatcctctttttctttttgtataaggctaagccgtttgatgagtgagcggctttaagagtgcaaccttttagcgatttctatagcaacatcatagcc

SEQ ID NO: 74 - protein, 386 aa, Helicobacter pylori
MLRKNILAYYGANFLLIIAQSLPHAILTPLLLSKGLSLSEILLVQTFFSFCVLVAEYPSGVLADLMSRKNLFLVSNAFLIASFSFVLFFDSFIFMLLAWGLYGLYSACSSGTIEASLITDIKENKKDLSKFLAKNNQITYLGMIIGSSLGSFLYLKVHAMLYIVGIFLIMLCVLTIIFYFKEKEGDFKSQKSLKLLKEQVKGSLKELKDNPKLKILLVGHLITPVFFMSHFQMWQAYFLKQGVKEQYLFVFYIAFQVISILIHFLKASSYSQKIALSSLVVLLGVSPLLLSNIPYCFIGVYALMVAFFTYMSYCLNYQFSKFVSKNNISSLSSLLSSCVRVVSVLILSLSSLELRYFSPLTIITMHFALTLIILFFFLYKAKPFDE

SEQ ID NO: 75 - DNA, 2218 bp, Helicobacter pylori
  CDS (77)...(2167)
gaagtttatgagccgttttgccactattcaaagaaattttggattataataaaaaaactggctgaaattaacaacaatgattaaacaatcattaaatggagaggacatgcaaaaaagtttagtttctttggcttgggtttttgtagctattttaggggcgatctgtttaggggtgttagccttacacaagggtgagagcattaacacgctatggcttgtagtagcgagcgcttgtatttatagcataggctatcgtttttatagccattttatcgcttataaggtgttaaagctagatgatagcagagccacgcccgcatgcgtaaggaatgatggcaaggattttgtgccaaccgataaagcgatcacttttgggcaccatttcgccgctattgctggggctggccctttagtaggcccgatactagccgctcaaatgggttacttgccctctatcttatggattttgataggctcggttttagggggttgcgtgcatgattttgtggtgctttttgcttctattaggcgcgatggcaagtctttaggcgaaatgatcaaacttgaaatgggccaatttgtaggcatgatcgcaagtctgggcattttagggatcatgctcattatcattgcgattttagcgatggtggtggtgaaggctttagcgcattcgccttggggcttttttacgatcgcaatgactattcccattgcgattcttatggggctttacatgcggtttttcaggccacacaagattttagaggtttctgttattggctttatcctattgattatagcgatttatgcgggtaaatacgtttctttagatcctaaattagcgtcaatattcacttttgaggccagttctttagcgtggatgatcatgggctatgggtttgtggcttctattttaccggtatggtttttactcgctccacgagattatctaagcacttttttaaaaattggcgttataggggtgttggttgtggccattatttttgtcgctccgcctttacaaatccctaaaatcacgccctttgtagatggcagtgggcctgtgtttgcaggaagcgtgttccctttcttgtttatcacggtggcttgcgggacgattagcggattccatgctttaatttcttcaggcacgacccctaaaatgctcgctaaagaaagcgacgcaaggctagtgggctatggctctatggtgatggagagcgttgtggctcttatggcgttggtgtgcgcagggatcttgcacccagggctttatttcgctatcaattcgccagaagtgagcatcggtaaagatatagctgatgcggcttcagtgattagctcatgggggtttaatatcagcgctgaagaaattcgtgagatgactaaaaacatcggcgaaagctccattttgagccgcaccggtggggcgcccacttttgcgatcggtttagcgatgattgtgtatcacattttaggggatccaagcgtgatggcgttttggtatcattttgcgattttgtttgaagctttgttcattttaaccgctgtggatgctggcacacgaaccgctcgtttcatgattcaagatttgctcggtaatgtttataagcctttgggcgatcttagctcttataaggctgggatttttgccactcttttgtgcgtggcagggtgggggtatttcttgtatcaaggcacgattgatcctaaaggggggatttatacgctatggcctttatttggcgtgagcaatcagatgttagcgggcatggcgttgttgttggtcacggtggtgttgtttaaaatggggcgttttaagggggcgatgataagcgccttaccggcagttttgattttatccatcactttttatagcggtattttaaaggtggtgccaaagagcgataacagcgtgctgaataatgtttcccatgtggcgcaaatgcaaatcatcaaagaaaaaatggctaccactaccgatgaaaaagcgctcaaaacgctccaaaaatccttttttaaccacgctattgatgcgattttgtgcgtgtttttcatgcttgtggcgctattggttttaatcgtgagcgttaggatttgctcaaacgcttattttaaaaacaaaatttacccaccgctggctgaaacgccctacatcaaagcctcttgaataaaaaaggggttttaaccccctttaaatccatagaaaaaagtttga

SEQ ID NO: 76 - protein, 697 aa, Helicobacter pylori
MIKQSLNGEDMQKSLVSLAWVFVAILGAICLGVLALHKGESINTLWLVVASACIYSIGYRFYSHFIAYKVLKLDDSRATPACVRNDGKDFVPTDKAITFGHHFAAIAGAGPLVGPILAAQMGYLPSILWILIGSVLGGCVHDFVVLFASIRRDGKSLGEMIKLEMGQFVGMIASLGILGIMLIIIAILAMVVVKALAHSPWGFFTIAMTIPIAILMGLYMRFFRPHKILEVSVIGFILLIIAIYAGKYVSLDPKLASIFTFEASSLAWMIMGYGFVASILPVWFLLAPRDYLSTFLKIGVIGVLVVAIIFVAPPLQIPKITPFVDGSGPVFAGSVFPFLFITVACGTISGFHALISSGTTPKMLAKESDARLVGYGSMVMESVVALMALVCAGILHPGLYFAINSPEVSIGKDIADAASVISSWGFNISAEEIREMTKNIGESSILSRTGGAPTFAIGLAMIVYHILGDPSVMAFWYHFAILFEALFILTAVDAGTRTARFMIQDLLGNVYKPLGDLSSYKAGIFATLLCVAGWGYFLYQGTIDPKGGIYTLWPLFGVSNQMLAGMALLLVTVVLFKMGRFKGAMISALPAVLILSITFYSGILKVVPKSDNSVLNNVSHVAQMQIIKEKMATTTDEKALKTLQKSFFNHAIDAILCVFFMLVALLVLIVSVRICSNAYFKNKIYPPLAETPYIKAS

SEQ ID NO: 77 - DNA, 911 bp, Helicobacter pylori
  CDS (121)...(861)
  misc_feature 837: n = A,T,C or G
taaggggctttgcattttttactcatttcatgcctctttttctttatttagacagattattatcttaaaataattgtaatatcattattattatatcaactcaataaaaaaggagaaggtatgcaaaaaacttctaacactctggcgctggggagtttgacagcgctattctttctaatgggttttatcacggttttaaacgatattttaatcccacacttaaagcccatttttgacttgacctattttgaagcttcactcattcaattttgcttttttggggcgtatttcatcatgggaggagtttttgggaatgtgatcagtaaaatcggctacccttttggcgtggtgcttggttttgtgatcacagcgacggggtgcgcgttgttttatccggcggcgcattttggatcctatgggttttttttaggagcgttgtttattttagcgagcgggattgtgtgcttgcaaaccgctggtaatccctttgtaaccttgctttctaaaggtaaagaagccagaaatttggttttagtccaggcgttcaattcgcttggcacaactttagggcctatttttgggagcttgttgatttttagcacgactaaaatgggcgataatgcaagtttgatagataaattagcggacgctaaaagcgttcaaatgccttatttgggcttggcggtgttttcgcttcttttagcgctcatcatgtatcttttgaaattgcctgatgtggaaaaagaaatgcccaaagagacgactcaaaaaagcttgttttcgcacaaacactttgtttttggggcttggggatctttttttatgtggggggagaantggcgattggctcattcttggtgctaagctttgaaaagcttttgaatttagactctcaatcaagcgcgcattac

SEQ ID NO: 78 - protein, 247 aa, Helicobacter pylori
  VARIANT 239: Xaa = Any Amino Acid
MQKTSNTLALGSLTALFFLMGFITVLNDILIPHLKPIFDLTYFEASLIQFCFFGAYFIMGGVFGNVISKIGYPFGVVLGFVITATGCALFYPAAHFGSYGFFLGALFILASGIVCLQTAGNPFVTLLSKGKEARNLVLVQAFNSLGTTLGPIFGSLLIFSTTKMGDNASLIDKLADAKSVQMPYLGLAVFSLLLALIMYLLKLPDVEKEMPKETTQKSLFSHKHFVFGAWGSFFMWGEXWRLAHSWC

SEQ ID NO: 79 - DNA, 3084 bp, Helicobacter pylori
  CDS (49)...(3027)
gaattaatgcattaaataactcaaaatttttgatcaaaggcttgaaatatgtcaaaaaaaattcccctaaaaaaccgcttgagagctgattttacaaaaaccccaacagatttagaagtccctaatttattattattacaacgagacagctatgattctttcttgtattctaaagagggtaaagagagcgggattgaaaaggtttttaaatccattttccctatccaagatgagcataaccgcatcactttagaatacgcgggttgcgaatttggcaagtctaaatacaccgttagagaagcgatggagaggggcattacctactctatccctctcaaaattaaggtgcgcttgatcttgtgggaaaaagataccaagagtggcgaaaagaacggcattaaggatattaaagaacaaagcattttcattcgtgagatccctttgatgacagaacgcacttcatttattattaatggggtggagcgcgtggtggtcaatcaactccacagaagccccggtgtgattttcaaagaagaagagtctagcacttctttaaacaagctcatttacacagggcaaatcattcctgataggggttcgtggttgtattttgaatacgattctaaagatgttttatacgctcgtatcaataaacgccgtaaagtgcctgttaccattttattcagggcgatggattatcaaaaacaagacatcatcaaaatgttctacccgcttgttaaagtgcgttatgaaaacgataaatatttgatcccgtttgcttcattagacgccaatcaaagaatggaatttgacttgaaagatcctcaaggcaaggttattcttttagcgggtaaaaagctcacttcaagaaagattaaagagcttaaagaaaaccatttagaatgggtggaataccctatggatattttactcaatcgccatttagctgagcctgttatggtagggaaagaagtcttattggacatgctcactcagctagataaaaacaaattagaaaaaatccacgatttaggcgtgcaagaatttgtgatcatcaacgatctggcgttagggcatgacgcttccattatccaatctttttcagccgattctgagtctttgaaattactcaagcaaaccgaaaaaattgatgatgaaaacgctctagcggcgattcgtatccataaggttatgaaaccaggcgatcccgttacgactgaagtggctaagcagtttgtcaaaaaacttttctttgatccagaacgctatgatttgaccatggtgggccgcatgaaaatgaatcacaagttaggcttgcatgtgcctgattacattacgactttaacgcatgaagatattatcaccaccgttaaatacctcatgaagatcaaaaacaatcaaggcaagattgatgacagggaccacttgggcaatcgtaggattagggcggtaggggaattgttggccaatgaattgcattcaggtttagtgaaaatgcaaaagaccattaaagacaagctcactaccatgagcggggcttttgattcgctcatgccccatgacttggtcaattctaaaatgatcacaagcaccatcatggaatttttcatgggcggtcagctctcgcaatttatggatcaaacgaatcccttgagtgaggttacgcacaagcgccgcctttcagcgctcggcgaaggggggttggtgaaagacagagtggggtttgaagccagggatgtgcaccccacgcattatggccgaatttgtcccattgagaccccagaaggtcaaaatatcggtctgatcaacaccctttccactttcacaagagtgaatgatttaggctttattgaagccccttataaaaaggttgtggatggcaaggtcgtgggtgagacgatttatttgaccgctattcaagaagacagccacatcatcgctcccgcaagcacccccattgatgaagaggggaatattttgggcgatttgattgaaacgcgcgtggaaggcgagatcgttttaaacgaaaaaagcaaagtaaccttaatggatttaagctctagcatgctagtgggggtagccgcatcgctcattcctttcttagagcatgatgacgccaaccgtgccttaatggggactaacatgcagcgccaagcggtgcccttattaagaagcgacgctcccattgtaggcacggggattgaaaaaattattgctagggattcttggggagcgatcaaagccaatcgcgcaggcgttgtagaaaaaattgattctaaaaatatttatattttaggcgaaagcaaagaagaagcctatattgatgcgtattctttgcaaaaaaacttgcgcaccaaccaaaacaccagtttcaatcaagtccctatcgttaaagtgggcgataaagtgggagccgggcaaatcatcgctgatggccctagcatggatagaggcgagttggcgttagggaaaaatgtgcgcgtggcgttcatgccttggaatggctataactttgaagacgcgatcgtggtgagtgagtgcatcactaaagatgatattttcacttccacccacatttatgaaaaagaagtggatgctagggagcttaagcatggtgtggaagaatttaccgctgatattcctgatgtgaaagaagaagcgctcgctcatcttgatgaaagcgggatcgttaaagtcggtacttatgtgagcgctggcatgattttggtgggcaaaacttctcctaaaggcgagattaaaagcacgcctgaagagcggcttttaagggctatttttggggataaagccgggcatgtggtcaataagagtttgtattgccctcccagtttggaaggcacggtgattgatgtgaaagtcttcactaaaaaaggctatgagaaagacgcgcgagttttgagcgcgtatgaagaagaaaaagccaagcttgatatggagcattttgatcgcttgaccatgctcaatagagaagaattgttgcgcgttactcgctcctttctcaagcgattttagaagagcctttcagccataacggcaaggattataaagaaggcgatcaaatcccta

SEQ ID NO: 80 - protein, 993 aa, Helicobacter pylori
MSKKIPLKNRLRADFTKTPTDLEVPNLLLLQRDSYDSFLYSKEGKESGIEKVFKSIFPIQDEHNRITLEYAGCEFGKSKYTVREAMERGITYSIPLKIKVRLILWEKDTKSGEKNGIKDIKEQSIFIREIPLMTERTSFIINGVERVVVNQLHRSPGVIFKEEESSTSLNKLIYTGQIIPDRGSWLYFEYDSKDVLYARINKRRKVPVTILFRAMDYQKQDIIKMFYPLVKVRYENDKYLIPFASLDANQRMEFDLKDPQGKVILLAGKKLTSRKIKELKENHLEWVEYPMDILLNRHLAEPVMVGKEVLLDMLTQLDKNKLEKIHDLGVQEFVIINDLALGHDASIIQSFSADSESLKLLKQTEKIDDENALAAIRIHKVMKPGDPVTTEVAKQFVKKLFFDPERYDLTMVGRMKMNHKLGLHVPDYITTLTHEDIITTVKYLMKIKNNQGKIDDRDHLGNRRIRAVGELLANELHSGLVKMQKTIKDKLTTMSGAFDSLMPHDLVNSKMITSTIMEFFMGGQLSQFMDQTNPLSEVTHKRRLSALGEGGLVKDRVGFEARDVHPTHYGRICPIETPEGQNIGLINTLSTFTRVNDLGFIEAPYKKVVDGKVVGETIYLTAIQEDSHIIAPASTPIDEEGNILGDLIETRVEGEIVLNEKSKVTLMDLSSSMLVGVAASLIPFLEHDDANRALMGTNMQRQAVPLLRSDAPIVGTGIEKIIARDSWGAIKANRAGVVEKIDSKNIYILGESKEEAYIDAYSLQKNLRTNQNTSFNQVPIVKVGDKVGAGQIIADGPSMDRGELALGKNVRVAFMPWNGYNFEDAIVVSECITKDDIFTSTHIYEKEVDARELKHGVEEFTADIPDVKEEALAHLDESGIVKVGTYVSAGMILVGKTSPKGEIKSTPEERLLRAIFGDKAGHVVNKSLYCPPSLEGTVIDVKVFTKKGYEKDARVLSAYEEEKAKLDMEHFDRLTMLNREELLRVTRSFLKRF

SEQ ID NO: 81 - DNA, 581 bp, Helicobacter pylori
  CDS (49)...(525)
aggttaaagtttaagacaaaccaaagagtttgtcttgtttgtttttgaatgcactctccaaatttagaaaaagaagaaaccgaaatcatagaaacactccttatgcgtgaaaaaatgcgtttatgccccttgtattggcgcatcttagcgtttttaaccgatggtttgttagtggcgtttttattgagcgatcttttagacgcatgcgatttcttgcattctttatattggctagctaaccctatttatcacagcgcatttgttgcgatgggttttatcatcttgtatggcgtttatgaaatcttttttgtgtgtttgtgcaagatgagcttggctaaactggtttttaggattaagattattgatatttatttggcagattgccccagtagggctattttattgaagcgtttagggttaaagatcgtggtttttctatgcccctttttatggtttgttgcgtttaaaaacccctatcatagggcgtggcatgaagaaaaaagcaaaagtcttttggtattgttttaatcatgatttattggttgtatttggcggtcttttttttgttgagcgcattagac

SEQ ID NO: 82 - protein, 159 aa, Helicobacter pylori
MHSPNLEKEETEIIETLLMREKMRLCPLYWRILAFLTDGLLVAFLLSDLLDACDFLHSLYWLANPIYHSAFVAMGFIILYGVYEIFFVCLCKMSLAKLVFRIKIIDIYLADCPSRAILLKRLGLKIVVFLCPFLWFVAFKNPYHRAWHEEKSKSLLVLF

SEQ ID NO: 83 - DNA, 901 bp, Helicobacter pylori
  CDS (67)...(852)
gaatttaagcggcagaggggataaggatttaagcaccgtttataacgctttaaaaggaggtttaaaatgaggtatcaaaacatgtttgaaaccttaaaaaaacacgaaaaaatggcgtttatcccgtttgtaaccttgggcgatcctaattatgaattgagttttgaaatcattaaaaccctaattattagcggggtgagcgctttagaattgggtcttgctttttctgatcctgtggcggatggcattaccatacaagcgagccatttaagggcgttaaaacacgctagcatggctaaaaatttccagcttttaaaaaagattagagattacaaccacaatattcccatagggcttttagcgtatgcgaatttaattttttcttatggcgttgatggcttttacgctcaagctaaagaatgcggtatagatagcgttttaatagcggacatgcccctaatagaaaaagaattagtcatcaaatccgctcaaaaacaccaaatcaagcaaatctttatcgccagccccaatgcgagcagtaaagatttagaacaagtcgctacgcattcgcaaggctatatctacgctttagccaggagtggggttacaggggcgagccgtattttagagaatgattcgagtgctattattaaaaccttaaaagcttttagccctaccccagccttactgggctttggcatttccaaaaaagaacacatcacaaacgctaaaggcatgggtgctgatggcgtgatttgcggatcagcgttagtcaaaatcatagaagaaaatttaaacaatgaaaacgccatgctggaaaaaattaaagggtttataggaggaatgattttttaaggcttttaggctttgttgcgttaaaaattaaagatcacagattaac

SEQ ID NO: 84 - protein, 262 aa, Helicobacter pylori
MRYQNMFETLKKHEKMAFIPFVTLGDPNYELSFEIIKTLIISGVSALELGLAFSDPVADGITIQASHLRALKHASMAKNFQLLKKIRDYNHNIPIGLLAYANLIFSYGVDGFYAQAKECGIDSVLIADMPLIEKELVIKSAQKHQIKQIFIASPNASSKDLEQVATHSQGYIYALARSGVTGASRILENDSSAIIKTLKAFSPTPALLGFGISKKEHITNAKGMGADGVICGSALVKIIEENLNNENAMLEKIKGFIGGMIF

SEQ ID NO: 85 - DNA, 1081 bp, Helicobacter pylori
  CDS (49)...(954)
  misc_feature 919: n = A,T,C or G
aagtaatgcccctgttgtatcagcttgatttaagaggaataagttattatgaataaagctattgctagtaagatactcatcactttgggttttttatttctctacagagtcttagcttatatccccattcctggcgtagatttagcagcgatcaaggctttttttgacagcaattccaacaacgctttggggttgtttaatatgtttagcgggaatgcggtttctcgcttgagcatcatctcgttgggtatcatgccctatatcacttcttcaattatcatggagcttttgagcgcgactttccctaacctggctaaaatgaaaaaagagcgggatggcatgcaaaaatacatgcaaatcgtgcgttatttgaccattttaatcaccctaatccaagcggtgagcgtttcagtaggcttaaggagcattagtggaggagccaatggggcgatcatgattgatatgcaagtttttatgatcgtttcagcgttttctatgcttacaggaacgatgctactcatgtggataggggagcaaatcacgcaaaggggcgtggggaatgggatcagtctcattatttttgccgggattgtttcagggatcccatcagctatttcaggcacattcaatttggtcaatacgggcgttattaatatcttaatgctcattggtattgtgctgattgttttagcgactatttttgcgattatctatgtggaattagctgagcgcaggatccctatttcttatgcgcgtaaagtggtgatgcaaaaccaaaacaagcgcatcatgaattacattcctattaagttgaatttaagtggggtgatcccccctattttcgcttcagctttgctcgtgttcccttctacgattttgcagcaagccacaagcaacaaaaccttgcaagcggttgcgnattttttaagcccgcaaggtatgcgtataatattttgatgttcttgctcatcatcttttttgcttacttttattcttctattgtgttcaattctaaggatattgcggataatttgaggcgtaatggcgggtatattccagggcttaggcctggagaggggac

SEQ ID NO: 86 - protein, 302 aa, Helicobacter pylori
  VARIANT 291: Xaa = Any Amino Acid
MNKAIASKILITLGFLFLYRVLAYIPIPGVDLAAIKAFFDSNSNNALGLFNMFSGNAVSRLSIISLGIMPYITSSIIMELLSATFPNLAKMKKERDGMQKYMQIVRYLTILITLIQAVSVSVGLRSISGGANGAIMIDMQVFMIVSAFSMLTGTMLLMWIGEQITQRGVGNGISLIIFAGIVSGIPSAISGTFNLVNTGVINILMLIGIVLIVLATIFAIIYVELAERRIPISYARKVVMQNQNKRIMNYIPIKLNLSGVIPPIFASALLVFPSTILQQATSNKTLQAVAXFLSPQGMRIIF

SEQ ID NO: 87 - DNA, 423 bp, Helicobacter pylori
  CDS (109)...(363)
aatggggcaattcaaggcgatagaagcttgaatgagggcttcttctaaggttttggctttgatttcaataaaattttgcatcaatgttcctttttgttttgcgcatgcatgcgttttttattctctaagactttattgatgatgagttgttgcaacaccgaaaggatgttgttcgtggtccaatacaagactaaccctgccgggaaagtgattaaaaagattgtgaataataggggtaagagtttaaaaatctttgcttgcatgggatcggtcatggtgtttggcgtaacgctttggtgccaatacatagacgctcccataagaagcggtaaaataaaatacggatccatgatggataaatcatgaatccataagatccactctgagcttttcaattccacagcgttataaagcactctataa

SEQ ID NO: 88 - protein, 85 aa, Helicobacter pylori
MRFLFSKTLLMMSCCNTERMLFVVQYKTNPAGKVIKKIVNNRGKSLKIFACMGSVMVFGVTLWCQYIDAPIRSGKIKYGSMMDKS

SEQ ID NO: 89 - DNA, 740 bp, Helicobacter pylori
  CDS (59)...(688)
tttaaaattagaaacagatgtatctgttttaaattttgaatagggagtttctatcattatgttattgaaaacaaaattaaaaattataagctcggtgattttgagcgctttattgtgggtgggttgctcaagcgaaatggcaacttatcaaaacgtgaatgatgccactaaaaatacgactgcaagcattaatagcacggatttattgctaaccgctaacgcgatgttagattccatgtttagcgaccctaattttgagcaactcaagggcaagcatttgattgaagtttcagatgtgattaacgacaccacgcagcccaatttggacatgaatcttttgacgactgaaatcgcgcggcagttgcggttgcgatctaatgggaggttcaatatcacaagggcgagcggagggagtggcattgcagccgatagcagaatggtgaaacagcgcgaaaaagaacgagagagcgaagagtataatcaagacaccactgtagaaaaaggcactttaaaagccgctgatttatctttaagtggtaaagtatctagtatcgcagcctctattagtagttctaggcagcgcttggactatgacttcaccctaagccttaccaacaggaaaacgggtgaagaggtatggagcgatgttaagcctattgtgaagaacgctagcaataagcgtatgttttaaatttatatttgaaaggatgaacaatgaaaaatcaagttaaaaaaatttt

SEQ ID NO: 90 - protein, 210 aa, Helicobacter pylori
MLLKTKLKIISSVILSALLWVGCSSEMATYQNVNDATKNTTASINSTDLLLTANAMLDSMFSDPNFEQLKGKHLIEVSDVINDTTQPNLDMNLLTTEIARQLRLRSNGRFNITRASGGSGIAADSRMVKQREKERESEEYNQDTTVEKGTLKAADLSLSGKVSSIAASISSSRQRLDYDFTLSLTNRKTGEEVWSDVKPIVKNASNKRMF

SEQ ID NO: 91 - DNA, 1269 bp, Helicobacter pylori
  CDS (84)...(1214)
ttatcattgtgttaaaatagtcgttttaacaaacaaaattttgttaatagattttacctaatctgagagagaattatattttaatgaagacagagaaacaaaaatttttagagatgcgtaaagatggggcgaactctgtgctgattttaagaggggattgggattttaaaacgagcgtgtttcgtttagatgagttgaaaaaaaatttattagatcatcaagggcctttaaaaatggatttttcagggtgccaaaaagtggattttgtttttggcatgtttttatttgatttagttaaggagcgttctttaaacattgaattgtgtaacgtgagtgagaataacgcatgcgctttgaaagtggttaaagactggcttgaaaaagaagaggatttagagtctaaaaaagcgggcaaacactacgaacttttgatcactaaattgggtaagagtatcgtagagacttataatacctttttaaacgcattcaatttttgcggcatgattttattctacttcattaaaagcgttttcaaccccaaacgcttttgtatcactcctttgctctatcatatcaatgaatccgggtttaaggttttgccagtgagtattttaacggtgtttatcgtggggtttgccgttgctttacaaggggctttacaattacaagacatgggcgcgcctttaatgtcggtggaaatgacggctaaactcgctttaagagaaatcggcccttttattttaacccttgtggtggccgggaggagcgcgagcagttttaccgcgcaaattggggtgatgaagatcactgaggaattagacgcgatgaaaaccatgggctttaacccttttgaatttttagtgttgcctagggtgttagccttagtgattgttttgcctttattggtgtttattgccgatgcgttcgccattcttgggggcatgtttgcgattaaataccaattggatttaggcttcccgagctatattgacagattccatgacacagtgggttggaaccattttttggtagggattgtcaaagcccctttttgggggtttgcgattgcgatggtagggtgcatgcgcgggtttgaagtcaagggggatactgagagcattgggcgcttgaccactattagcgtcgtgaacgctttgttttggatcattttcttagacgctattttttctatcatcttttctaagttgaacatataatgaacgctactaacaatcaagtcttaattgaagtgaaggatctccatagcgc

SEQ ID NO: 92 - protein, 377 aa, Helicobacter pylori
MKTEKQKFLEMRKDGANSVLILRGDWDFKTSVFRLDELKKNLLDHQGPLKMDFSGCQKVDFVFGMFLFDLVKERSLNIELCNVSENNACALKVVKDWLEKEEDLESKKAGKHYELLITKLGKSIVETYNTFLNAFNFCGMILFYFIKSVFNPKRFCITPLLYHINESGFKVLPVSILTVFIVGFAVALQGALQLQDMGAPLMSVEMTAKLALREIGPFILTLVVAGRSASSFTAQIGVMKITEELDAMKTMGFNPFEFLVLPRVLALVIVLPLLVFIADAFAILGGMFAIKYQLDLGFPSYIDRFHDTVGWNHFLVGIVKAPFWGFAIAMVGCMRGFEVKGDTESIGRLTTISVVNALFWIIFLDAIFSIIFSKLNI

SEQ ID NO: 93 - DNA, 557 bp, Helicobacter pylori
  CDS (60)...(503)
cacaagagaaaatttgcaagcgtttttacaacaaaataagataaattagggagagtggtatgggatttttgaatgggtattttttatgggttaaggctttccatgtgatagcggtcatttcgtggatggcagcgttgttttatttgccgcgcctttttgtctatcatgcagaaaacgcgcataaaaaagagtttgtaggagtggttcaaatccaagaaaaaaagctttattcctttatcgcttcaccggctatgggttttacgcttattacagggattttaatgctgttgatagagcctacgctctttaaaagtgggggttggttgcatgctaaattggctttagtggttttacttttagcctatcatttttattgcaaaaaatgcatgcgcgagctggaaaaagaccccacaaggagaaacgcaaggttttatcgcgtgtttaatgaggcgccaacgattttaatgatcctcattgtgattttagtggttgtcaagcctttttaaagacaagccatgaaaaaagaaaagtcatgaaaaaagaaaagcatctcaagc

SEQ ID NO: 94 - protein, 148 aa, Helicobacter pylori
MGFLNGYFLWVKAFHVIAVISWMAALFYLPRLFVYHAENAHKKEFVGVVQIQEKKLYSFIASPAMGFTLITGILMLLIEPTLFKSGGWLHAKLALVVLLLAYHFYCKKCMRELEKDPTRRNARFYRVFNEAPTILMILIVILVVVKPF

SEQ ID NO: 95 - DNA, 1671 bp, Helicobacter pylori
  CDS (50)...(1624)
caaaattatctggtgctaagactttgaaacaacgccaaataacaactgaatgaaactttttaacgctcgtttaatcgtttttattggcgcgcttcttttaggggtagggttttctgtgccttctttactagaaactaaaggccctaaaatcactttaggtttggatttaaggggggggttgaacatgcttttaggggtacaaaccgatgaggctttaaaaaacaagtatttaagcttggcgtccgctttagaatacaacgctaaaaagcaaaatatcttgcttaaagatattaaatccaatttagaagggatcagttttgagcttttagatgaagatgaagcgaaaaaattagacgcgcttttattggaattgcaaggccatagccagtttgaaatcaaaaaggaagcggggttttatagcgtgaatctcacccctttagagcaagaagaattgcgtaaaaacacgattttgcaagtgatagggatcattcgtaaccgcttggatcaatttggtttggcagagcctgtagtcattcagcaaggtaaagaagaaatttcggtgcaattgcctggcattaagactttagaagaagaacggcgcgctaaagacttgatttcaagatccgctcatttgcagatgatggcggtggatgaagaacacaataaagatgcgatgaaaatgacggatttagaggctcaaaaattaggcagcgtgttgttgtctgatgtggaaatggggggtaaaatcttgctcaaagcgatccccattttagatggcgaaatgcttacagatgcgaaagtggtgtatgaccaaaacaaccagccggtggtgagcttcacgctggatgcgcaaggggctaagatttttggggatttctcaggtgcgaatgtgggcaaacgcatggcgattgttttagacaataaggtctattcagccccggtgattagggagcgtatcggtggggggagcgggcagattagcgggaattttagcgtggctcaagcgagcgatttagcgatcgctttaaggagtggggcgatgagcgctcccattcaggttttagaaaaaagaattataggcccaagtttagggaaagacagcgttaaaacttccattatcgctctagttgggggctttattttagtgatgggctttatggtgctttattactctatggcgggggtgatcgcttgtttggcgttagtggtcaatctttttttgattgtggcggtcatggcgatttttggagcgacgctgactttaccgggaatggcggggattgttttaaccgtggggattgccgtggatgctaatatcatcatcaacgagcgcattagagaagtcttaagagagaatgagggcatcgctaaagcgatccatttaggctatatcaatgcgagccgggcgatttttgattctaatatcacttctttgatcgcttcagtgttattatacgcttatggcacaggagcgattaaaggctttgccctaactacaggcattgggattttagcctctattatcaccgctattgttggcacgcaagggatttatcaagcccttttacctaaactcactcaaacaaaaagcctttacttttggtttggcgtgaataaaagagcttaggaggttttatggaattattcaaacgaactagaatcttaagcttc

SEQ ID NO: 96 - protein, 525 aa, Helicobacter pylori
MKLFNARLIVFIGALLLGVGFSVPSLLETKGPKITLGLDLRGGLNMLLGVQTDEALKNKYLSLASALEYNAKKQNILLKDIKSNLEGISFELLDEDEAKKLDALLLELQGHSQFEIKKEAGFYSVNLTPLEQEELRKNTILQVIGIIRNRLDQFGLAEPVVIQQGKEEISVQLPGIKTLEEERRAKDLISRSAHLQMMAVDEEHNKDAMKMTDLEAQKLGSVLLSDVEMGGKILLKAIPILDGEMLTDAKVVYDQNNQPVVSFTLDAQGAKIFGDFSGANVGKRMAIVLDNKVYSAPVIRERIGGGSGQISGNFSVAQASDLAIALRSGAMSAPIQVLEKRIIGPSLGKDSVKTSIIALVGGFILVMGFMVLYYSMAGVIACLALVVNLFLIVAVMAIFGATLTLPGMAGIVLTVGIAVDANIIINERIREVLRENEGIAKAIHLGYINASRAIFDSNITSLIASVLLYAYGTGAIKGFALTTGIGILASIITAIVGTQGIYQALLPKLTQTKSLYFWFGVNKRA

SEQ ID NO: 97 - DNA, 706 bp, Helicobacter pylori
  CDS (64)...(654)
cagggggcaagggggctgttagggaagcgattgattatcttttaacattagaaggcttgcaagatgaagcgctcaagctttacctctaatagcgttttaaacttttttgtagttttgtctttcattacgataggattagtgtttttctttttgcgttcccaacccactagcgtagtttctaaagaaaatatccctaaaattgaattagaaaattttaaagcgtttcaaatcaacgataaaatccttgatctgtccatagagggcaaaaaagccctacaatacgatgatcatgaaatcttttttgattccaaaatcaagcgctatgatgaagacaccattgaaagcgttgagtctcctaaggccaaacggcagcaggatttgtatttcttccctaatggggttacttataaaagaagcgatgattccagtttttggagtgaaacagggatttataaccataaggagcaaaattttaaaggcaagggccgtttcattctcacttcaaaggacagcaagattgaagggcttgacatttcttattcgcatgcattagctattattgaagctcaaagcattcaagcgcatttattcttagatgaaatcaaacaaagccaaaaagaaaagaaaaaattccccactttcaaaggaggtttttaatgcgttggtggtgttttttggtgtgttgttttggtattttaagcgtgat

SEQ ID NO: 98 - protein, 197 aa, Helicobacter pylori
MKRSSFTSNSVLNFFVVLSFITIGLVFFFLRSQPTSVVSKENIPKIELENFKAFQINDKILDLSIEGKKALQYDDHEIFFDSKIKRYDEDTIESVESPKAKRQQDLYFFPNGVTYKRSDDSSFWSETGIYNHKEQNFKGKGRFILTSKDSKIEGLDISYSHALAIIEAQSIQAHLFLDEIKQSQKEKKKFPTFKGGF

SEQ ID NO: 99 - DNA, 1010 bp, Helicobacter pylori
  CDS (130)...(957)
aagcgagcaagaatgaattaaaaatttttggttggcactacatcatagaaacaggcaggatttataattataattttgaaagccatttttttgagccgattggagaaaccattaaacaaaggaaaagtcatgaaaacttctaaaacaaaaacccctaaatccgttttaatcgctgggccatgcgtcattgagagcttagaaaatctaagaagtatcgccactaaattgcaacccctagccaacaacgagcggttggatttttattttaaagcgagttttgataaggcgaaccgcacgagtttagagagttacagagggcctggtttagaaaaaggcctagaaatgttacaaacgatcaaagaggaatttggttataaaatcttaaccgatgtgcatgagagttatcaagcaagcgtggcagccaaagtggcggatattttacaaatcccggcgtttttgtgccgccaaacggatctgattgtagaagtgagccagactaacgctattgtcaatatcaaaaaagggcaattcatgaacccaaaagacatgcaatattctgttctaaaggcccttaaaacgagagataaaagcattcaaagccccacttatgaaacagcgttaaaaaatggcgtgtggctgtgtgaaagggggagcagctttgggtatgggaatttagtggtggatatgcgctctttaaaaatcatgcgagaatttgcccctgtgatttttgacgctacccatagcgtgcaaatgccagggggagcgaacgggaaaagttcaggagacagctcttttgcccctattttagcgagagctgcggcggcggtggggattgatgggttgtttgctgaaacgcatgttgatcctaaaaacgccctaagcgatggagcaaacatgctaaaacctgacgagctagaacaattagtaaccgacatgttaaaaatccaaaatttattttaaaggaatttcatgcaaatcatagaagggaaattgcaattacaagggaatga

SEQ ID NO: 100 - protein, 276 aa, Helicobacter pylori
MKTSKTKTPKSVLIAGPCVIESLENLRSIATKLQPLANNERLDFYFKASFDKANRTSLESYRGPGLEKGLEMLQTIKEEFGYKILTDVHESYQASVAAKVADILQIPAFLCRQTDLIVEVSQTNAIVNIKKGQFMNPKDMQYSVLKALKTRDKSIQSPTYETALKNGVWLCERGSSFGYGNLVVDMRSLKIMREFAPVIFDATHSVQMPGGANGKSSGDSSFAPILARAAAAVGIDGLFAETHVDPKNALSDGANMLKPDELEQLVTDMLKIQNLF

SEQ ID NO: 101 - DNA, 240 bp, Helicobacter pylori
  CDS (59)...(196)
aacaattcttttttaagcaaaaacaaaacaaaattaaggcataatcactctttttaaaatgaaaggtcgcgtagctcagttggtagagcactaccttgacatggtagtggccgctggttcaagtccagtcgtggccaccattatcactccaattttaattctcatttttttgcgagtttttgatctttataaattctaaaggggtattaaacgcacttctaataacgattttatagcgct

SEQ ID NO: 102 - protein, 46 aa, Helicobacter pylori
MKGRVAQLVEHYLDMVVAAGSSPVVATIITPILILIFLRVFDLYKF

SEQ ID NO: 103 - DNA, 1382 bp, Helicobacter pylori
  CDS (91)...(1329)
accaccccttaatctcaaaaaaccccaatcataaaaagctttatgctacaatgaaagctctttaacacgataaaagggcggtttaatagcatggcacaagaaaaagcagttccaagagatcctaaaaaactcaatgcgtttgatttgcgttggatggtgtccttatttggcacggcggtgggggctgggattttatttttgcctattagagccggtgggcatggggtatgggctattgtggtaatgagcgcgatcattttccctttaacttatctagggcatagagctttagcttatttcataggatctaaagacaaagaagacattaccatggtcgttcgctctcattttggcgctcaatggggttttcttatcactttgctttatttcttagcgatttatcctatttgcttggtttatggggtgggtatcactaacgtgtttgatcattttttcactaaccagttgcatttagcgccttttcatcggggattattggctgtagcgttagtttctttaatgatgttggtgatggtttttaacgctacgattgttacgcgcatttgtaacgctttagtgtatcctttatgcttgattttattgcttttttctttgtatcttatcccttattggcaaggcgctaatctttttgtggtgccgagttttaaagaatttgtgttagcgatttggctaaccttaccggtgcttgtgtttgcattcgaccatagccccatcatttcaaccttcactcaaaatgtgggaaaagaatacggcgttttcaaagaatacaaactcaatcaaattgaattagggacatcgctgatgcttttagggtttgtgatgttttttgtgttttcgtgcgtcatgtgcttgaatgctgatgattttgtgaaagcaagggaacaaaatatccccattttaagctatttggctaacactttaaacaaccctttaatcaattatgcggggcctgtggtggcttttttagcgattttttcatctttttttgggcattattatggggctaaggagggtttagaaggcattattattcaaagcttaaaattgaaaaaagcttctaaacccttgagcgttagcgtaacgatttttttatggctgactatcacgcttgtggcttatattaaccccaatatcttggattttattgaaaatttaggcggccccattatcgcgctcattctgtttgtgatgcccatgatagctttttatagtgtttctagtttgaagcgttttagaaatttcaaagtggatatttttgtgtttgtctttgggagcttgacggctttgagcgtgtttttaggactattttaatggctagtttttctattttatctatttttaaaatcggcgtggggcctagc

SEQ ID NO: 104 - protein, 413 aa, Helicobacter pylori
MAQEKAVPRDPKKLNAFDLRWMVSLFGTAVGAGILFLPIRAGGHGVWAIVVMSAIIFPLTYLGHRALAYFIGSKDKEDITMVVRSHFGAQWGFLITLLYFLAIYPICLVYGVGITNVFDHFFTNQLHLAPFHRGLLAVALVSLMMLVMVFNATIVTRICNALVYPLCLILLLFSLYLIPYWQGANLFVVPSFKEFVLAIWLTLPVLVFAFDHSPIISTFTQNVGKEYGVFKEYKLNQIELGTSLMLLGFVMFFVFSCVMCLNADDFVKAREQNIPILSYLANTLNNPLINYAGPVVAFLAIFSSFFGHYYGAKEGLEGIIIQSLKLKKASKPLSVSVTIFLWLTITLVAYINPNILDFIENLGGPIIALILFVMPMIAFYSVSSLKRFRNFKVDIFVFVFGSLTALSVFLGLF

SEQ ID NO: 105 - DNA, 875 bp, Helicobacter pylori
  CDS (63)...(827)
tttgccaccttattgcaaaccctaatgctaacgcactacttttttatctttaaagagaaagaatgctagattttattcaagagcttagcaccccccatgttagggattttttcttgttgtttttaagggttagcggcgtgctgtctttcttccctttttttgaaaaccatttagtgcctttgtcggtgcgtggggctttgagtttgtatgtgagcgcgattttttaccccactttagaattttcaaacgccgcttacacgccagagggttttatcattgcttgcttgtgcgaattgtttttaggggtgtgcgcgtctgtctttttacaaatcgtctttgcaagcttagtgtttgcaaccgatagcatcagcttttctatggggcttacgatggcgagcgcgtatgatcctatttcaggatcgcaaaaacccattgtggggcaagcccttttattgttagcgattttaattttattggatttatcgttccaccatcaaatcattttgtttgtggatcacagcttaaaagccgtccctttagggcaatttgtctttgagccagcgttggctaaaaacatcgttaaagccttttcgcacctctttgtcatagggttttctatggcgttccctattttatgcttggtgttattgagcgatattatttttggcatgatcatgaaaacccaccctcagttcaacctgctcgctattgggtttccggttaaaattgcgatcgggtttgtgggcattatcttaatcgcttcggctatcatggggcgttttaaagaagaaatcagcctggcctttagcgccattagcaaaatcttttaaaggataaacatgattagttttaaagaagctctaaaaatccattct

SEQ ID NO: 106 - protein, 255 aa, Helicobacter pylori
MLDFIQELSTPHVRDFFLLFLRVSGVLSFFPFFENHLVPLSVRGALSLYVSAIFYPTLEFSNAAYTPEGFIIACLCELFLGVCASVFLQIVFASLVFATDSISFSMGLTMASAYDPISGSQKPIVGQALLLLAILILLDLSFHHQIILFVDHSLKAVPLGQFVFEPALAKNIVKAFSHLFVIGFSMAFPILCLVLLSDIIFGMIMKTHPQFNLLAIGFPVKIAIGFVGIILIASAIMGRFKEEISLAFSAISKIF

SEQ ID NO: 107 - DNA, 1160 bp, Helicobacter pylori
  CDS (373)...(1110)
gagatattaaaaagagatattaaaatggcttttaagcttctatgaagcccccccccctcctccttttgccctttatttcgtgggcaaatcgcccacaggacaagcggccacacccacgcttgggcgggtgattttttctacattttcttgagcttttttggggtcattcacccaagttttatagaactcaaaagggcattccgccacacccttatccccatcgccactagcaaaaaccccactataacctctgtgcaagagtttgaagagttggttttggctttggtcgtattttctcgcatcacggatttgttgcacagaaagttgagcgtattgaagaccattttcttcttccccgcattcgcccaaagtatgcccgtcaaaaccaataatgctagaatgcccaaaataggaatacaccccatcaaaaccggtcgcattcgctaccgctacataacattgattggcccacgccatagcttttactattgcaatttgttgctccttagccggatacatgtaaccttgacagcgcacaatgagttctgccccacgcatcgcgcaatcgcgccaaatttcagggtagtttccatcatcgcaaataatcaaagaaactttcaagcccttaggcccatcaaccacataagttttatccccaggataccaacattcaatagggcaccaaggcaagattttgcggtatttttgcacgatctcacccttatcattgacaagaatcaaagtgttatagggattctttttggcttgctcgtgtttttcccctgtcaaagagaacactccccaaaccttgtttttcttacaagcttcagcaaagatcgcggtttcttctccaggaacgcttgcggctgtatcaaacatttcttgtctgtcatacataatcccatgcgtgctgtattcagggaaaataatcagatccaacccaggcaaaccctgtttgaccccaccaatcaccttagcgatattgcgacaattttccaacacctcattcttagtgtggagtctaggcatcttataattaactaccgctacacccacagtatctgggctgctactaatatctccatgtctcatattatgttccttgttttttgatgagagttcctacaaaccctctacttgaatttataaaataattgtgt

SEQ ID NO: 108 - protein, 246 aa, Helicobacter pylori
MPVKTNNARMPKIGIHPIKTGRIRYRYITLIGPRHSFYYCNLLLLSRIHVTLTAHNEFCPTHRAIAPNFRVVSIIANNQRNFQALRPINHISFIPRIPTFNRAPRQDFAVFLHDLTLIIDKNQSVIGILFGLLVFFPCQREHSPNLVFLTSFSKDRGFFSRNACGCIKHFLSVIHNPMRAVFRENNQIQPRQTLFDPTNHLSDIATIFQHLILSVESRHLIINYRYTHSIWAATNISMSHIMFLVF

SEQ ID NO: 109 - DNA, 1661 bp, Helicobacter pylori
  CDS (79)...(1611)
ggctttataaaaaatgttagaaacccttacaaaacaagctaatatattctattcaatttgcctcaaggacaaacaaacatgaaaaaacttctttataccatactcgcgcttcttttaatcggccttttaacaatctatctcatcctttttacagaatgggggaataagatcatcgcttcgtatatagagaaaaaaatcaacccgaacgagcactacttgagcgttaaaacctttaaattgagattcaactctttggattttaaagctcaagccaacgatgattccacgctcattcttaagggggatttttcacttttaaagcaaagcgtaaatttgaattaccatatagatattaaagatttacgctctttcaaagaatggataccctaccctttaaggggggctgttatcacttctgggaatattaaagggcatagaaaagcccttatgattcaaggcgtctctaatgtggctcaatcccacactgcctacaatgcccttttagatgatttcaagctttctcgcttaaatttgaacgcacaagacgccaatttagaagatttgctttatttaatcaatcgccccgcttatgcgaacgcaaaagtgtccttacaggcggattttaactctctaaagcctttagaggggcatttgatcctaacagctaataacgctttaatcaataacgccctaatcaatcaaatttttcatttaaaccttaaagacacgcttgttttcagcctctcgcattcaagcgactttaaaggaaacaaagccatcagcgataccaccctgactagccctttagccaatttcaaagccctaaaaagcgaataccttttctctattttaaaactcaacgccccctacactttagaaatccccaatctagccaaactctataacattaccaaccaccccttaaaagggagcttgactttaaaaggcgctatagaacaaagccccaaacttttaaaagtcagcggccattcaaatttactagacggcgcgctggatttcacgcttttaaataaagatttgaaagggcgtttttccaatatttccactttaaaagctttagatttattccattaccctaagtttttccaatccgttgcagacgctaatttggattatgatcttatcgctaagcaaggcgtattgaaagcccgcctaaaaaacgcaagattcctcaaaaatgcattcagcgattttctctactccatttctaaatttgatattacaaaagaaatttataacgatgccaatctggtaagccaaatcaaccagcaacgcctgctctctgatctgagtttaaaaagccccaaaacccaattgaaaatccataacggtttgttggatttaaacaccaaacaaatgaacatgctcatggatgcggaaattttaaaattcatttttaaaatgaaacttcaaggcaacatgcaccagccaaaattttctctcattttaaacgaaaaagccattcagcaaaacttgcaacaaggcttgaaagaaatcttaaaaaacgacacccttaaaaaaggtttagatcatttgcttaaagatgataagctcaaagaaaagcttgaaaaagggcttaaggggcttttttaaaattttaaaggatagaaatggcgcacattttagttagcggggcgact

SEQ ID NO: 110 - protein, 511 aa, Helicobacter pylori
MKKLLYTILALLLIGLLTIYLILFTEWGNKIIASYIEKKINPNEHYLSVKTFKLRFNSLDFKAQANDDSTLILKGDFSLLKQSVNLNYHIDIKDLRSFKEWIPYPLRGAVITSGNIKGHRKALMIQGVSNVAQSHTAYNALLDDFKLSRLNLNAQDANLEDLLYLINRPAYANAKVSLQADFNSLKPLEGHLILTANNALINNALINQIFHLNLKDTLVFSLSHSSDFKGNKAISDTTLTSPLANFKALKSEYLFSILKLNAPYTLEIPNLAKLYNITNHPLKGSLTLKGAIEQSPKLLKVSGHSNLLDGALDFTLLNKDLKGRFSNISTLKALDLFHYPKFFQSVADANLDYDLIAKQGVLKARLKNARFLKNAFSDFLYSISKFDITKEIYNDANLVSQINQQRLLSDLSLKSPKTQLKIHNGLLDLNTKQMNMLMDAEILKFIFKMKLQGNMHQPKFSLILNEKAIQQNLQQGLKEILKNDTLKKGLDHLLKDDKLKEKLEKGLKGLF

SEQ ID NO: 111 - DNA, 397 bp, Helicobacter pylori
  CDS (53)...(352)
ctaattctgtctattacaccaacaatcaatctcaaaacaaaggacatgaaagatgaaaacaaaacataaaggaataagaatgtttaagcaaattcgtagaatgatgagtttggcaatattaatgcctagttttttattggcggcaccagattacaaacaaaaattcactcaaatattggatttcataagcaatgactttatcaaggctattggtggtctaatcattgttgggacttgcatttacgcctataaaaattgggacaggcttggagaaattggttggaaatgcgttgggattatcattataaccgctgctatttctaatgctaaaactttaagtcaatggttattttagatggcattgcatattgtttgtgttgaaagtatcaacattaga

SEQ ID NO: 112 - protein, 100 aa, Helicobacter pylori
MKTKHKGIRMFKQIRRMMSLAILMPSFLLAAPDYKQKFTQILDFISNDFIKAIGGLIIVGTCIYAYKNWDRLGEIGWKCVGIIIITAAISNAKTLSQWLF

SEQ ID NO: 113 - DNA, 367 bp, Helicobacter pylori
  CDS (52)...(318)
cttgccaatcccttcaatatccaccgaattgatgccatgctcaattaaaaaatgatccaaagcgacgctgtctttaagataaatttctgtcttgcccttcttgtatttgtaaagaggggcttgagcgatataaacatgcccttgttcaatcagcgggcgcaaataacgatagaaaaaagtcatcagcaaggtttggatatggctcccatccacatcagcatcggtcatgataatgattttatgatagcgcaatctttctatatcaaaactctcttgaatgccgcacccaaaagccgtgatcatgtttttaatttcttctgattttaggatttttgataaatggcttttttccacatttaaaatctta

SEQ ID NO: 114 - protein, 89 aa, Helicobacter pylori
MIQSDAVFKINFCLALLVFVKRGLSDINMPLFNQRAQITIEKSHQQGLDMAPIHISIGHDNDFMIAQSFYIKTLLNAAPKSRDHVFNFF

SEQ ID NO: 115 - DNA, 386 bp, Helicobacter pylori
  CDS (54)...(344)
taaaaagcactttagagagatttacgaaagtgttttgaagcgaagaatgtctgatgattatctttggaaaagattacctatctacagacttgcaaaatagcgctaaagatattcttctcatcgcttcgcaaattctcaaagaaagactttttgcccacaaaaatgagattttcttttgccctagaaatagctacattcaagcgtttagaatctatcaagaaagaaagattaccataagttttcacggtggaataaataataatatctgccttctcgccttgaaaggcatccacagtgtctattttgagctcatcaaaattcttgaagccgtatttttccacttctgatcgcaagcatcttttttgggcattataaggtgtgataat

SEQ ID NO: 116 - protein, 97 aa, Helicobacter pylori
MIIFGKDYLSTDLQNSAKDILLIASQILKERLFAHKNEIFFCPRNSYIQAFRIYQERKITISFHGGINNNICLLALKGIHSVYFELIKILEAVFFHF

SEQ ID NO: 117 - DNA, 569 bp, Helicobacter pylori
  CDS (55)...(516)
gcggtttggatcttcattaaaaattcgttgctcacccctgggttataagcttgagcttcagaagtggccccctcagaggttttgttggattcttcttgcttgtctttttctttgactatatccttagttgttacttgtttaggagcgcttttttctttagcttcctctttagcttcttcttttttgggctcttctttaggctcttcttttttaacctcttcaactttaggctcaggcttaggctcgggttttggttcaggtttgggttcaggcttaggttttggttttggctttggcttgggtttaggcttaggtttaggctttgtaacctcctttttgggttcttctttttttggctcttctttcttgggtttttctttaggctcttctttgggtttagccgactcagcattagtctttgtattggaattagtgttgatgctggctaaactcatggtaaccttagtggtcccggcttgcgctaaaggctctggggcgtcttcgcgcagtaaaaaatagccaaaccctatagcgtatagggcaaaagagattaaaaagctaacactcgt

SEQ ID NO: 118 - protein, 154 aa, Helicobacter pylori
ASEVAPSEVLLDSSCLSFSLTISLVVTCLGALFSLASSLASSFLGSSLGSSFLTSSTLGSGLGSGFGSGLGSGLGFGFGFGLGLGLGLGFVTSFLGSSFFGSSFLGFSLGSSLGLADSALVFVLELVLMLAKLMVTLVVPACAKGSGASSRSKK

SEQ ID NO: 119 - DNA, 359 bp, Helicobacter pylori
  CDS (77)...(310)
ccccacaaatcctagcgatagtgaaatgccctaattcatggacaaagattaaaaacgccagcatcaaaaccgctacaatgaacatcatacccctgcaggctctttggtgttaggatcttttatcatcggctcttttaaaggcgtgggtgctatagggggcgtgggtgctgtggtttttgggatttctttattttcttttgggggtttttgccacaactctgtcaaagccgccgcttttttaggatccattttggctaaaattttaccgagttcttggggttttagcgccattaaaatttctaatgcgttttgagtgggtaaattttctaaaatcagagccgatttagaatctttcattt

SEQ ID NO: 120 - protein, 78 aa, Helicobacter pylori
NEHHTPAGSLVLGSFIIGSFKGVGAIGGVGAVVFGISLFSFGGFCHNSVKAAAFLGSILAKILPSSWGFSAIKISNAF

SEQ ID NO: 121 - DNA, 1051 bp, Helicobacter pylori
  CDS (51)...(998)
gggttttgtgaatgacgactaaaagagtgaatactgccacaaacaagataatgacattaaatactttcttggatacatgttttcttttattcatcagtattcttttttatttaagtataccaatttatcctaacaaagtggtggttgtcccgcaaggttcgctcaaaaaagtgtttttttctttaaaagagcaaggcgtggatatgaacgctttggatttgctttttttacgcctgatgggcatgcctaaaaaaggttatattgatatgggcgatggggctttaaggaagggggattttttagtccgtttgattaaggcaaaagcggcacaaaaaagtgcgactctaatccctggggaaagccgctattttttcacgcaaattttgagcgagacttaccaactagaaacaagcgatctcaatcaggcttatgaaagcatcgctccacgattgaatggcgaagtgatagaagatggggtgatatggccagacacttatcatttgcctttaggggaggacgcttttaaaatcatgcaaactttgattggtcaatccatgaaaaaacacgaagccttaagcaaacaatggcttggatactaccataaagaagagtggtttgaaaaaatcattctcgcttctattgtgcaaaaagaagccgctaatgttgaagaaatgcccttgattgcgagcgtgatttttaaccgcttgaaaaaaggcatgcctttacaaatggatggggctttgaattatcaggaattttcacacgctaaagtaaccaaagagcgcattaaaaccgataacaccccctacaatacctataaatttaagggtttgcctaaaaatcctgtagggagcgtgagcctagaagcgattagagccgtgatcttccctaaaaaaacggatttcttgtattttgtgaaaatgccggataaaaaacatgctttcagcgcgacttataaagagcatttaaaaaacattaatctttctaataatcatttttaagattaaggtaaatggggcgttttttcttttgaattgagtaaaaagtgttt

SEQ ID NO: 122 - protein, 316 aa, Helicobacter pylori
MTLNTFLDTCFLLFISILFYLSIPIYPNKVVVVPQGSLKKVFFSLKEQGVDMNALDLLFLRLMGMPKKGYIDMGDGALRKGDFLVRLIKAKAAQKSATLIPGESRYFFTQILSETYQLETSDLNQAYESIAPRLNGEVIEDGVIWPDTYHLPLGEDAFKIMQTLIGQSMKKHEALSKQWLGYYHKEEWFEKIILASIVQKEAANVEEMPLIASVIFNRLKKGMPLQMDGALNYQEFSHAKVTKERIKTDNTPYNTYKFKGLPKNPVGSVSLEAIRAVIFPKKTDFLYFVKMPDKKHAFSATYKEHLKNINLSNNHF

SEQ ID NO: 123 - DNA, 637 bp, Helicobacter pylori
  CDS (51)...(584)
gaaagttcgggggcggattctatgattaatggctatggttataccaaagaatgagtcaaaaaatcctaattctaggtattggcaatatcctttttggcgatgaagggattggggtgcatttagcccactacctcaaaaaaaatttttcttttttccctagcgtggatattatagatggggggacaatggcccagcagctcattcctttaatcacttcgtatgaaaaggttttgattttggattgcgtgagcgctgaaggcgttgagataggatcagtctatgcttttgattttaaggacgctcctaaagaaatcacatgggctgggagcgctcatgaagtggaaatgctacacactttaaggctcacggagtttttaggggatttgcctaaaacttttatcgtggggcttgtgccttttgtgatagggagcgagaccactttcaagctttcaagcaaaattttaaacgctttagaaaccgccttaaaagccatagaaacccaactcaacgcatggggggttaaaatgcaacgcaccgatcatatcgctttagaatgtatcgctgaactttcttataagggtttttgaattggtttttgtttttctttttaaatgcgttaatgaagaaacaagcctga

SEQ ID NO: 124 - protein, 178 aa, Helicobacter pylori
MSQKILILGIGNILFGDEGIGVHLAHYLKKNFSFFPSVDIIDGGTMAQQLIPLITSYEKVLILDCVSAEGVEIGSVYAFDFKDAPKEITWAGSAHEVEMLHTLRLTEFLGDLPKTFIVGLVPFVIGSETTFKLSSKILNALETALKAIETQLNAWGVKMQRTDHIALECIAELSYKGF

SEQ ID NO: 125 - DNA, 214 bp, Helicobacter pylori
  CDS (51)...(161)
gcattgctaatttgggaatacttgtttatgccagtgaaataggagcggctatgatgtggcgtagtctcarggtggcttttacgatcactgatattagtaaaacctttcaatcccagcctaagcaccatcaaatcggcactttagaattgaatttcgccttttgatttaatatcagtttaatatttttcttcctatatgatatttatatgatatt

SEQ ID NO: 126 - protein, 37 aa, Helicobacter pylori
  VARIANT 7: Xaa = Any Amino Acid
MMWRSLXVAFTITDISKTFQSQPKHHQIGTLELNFAF

SEQ ID NO: 127 - DNA, 1576 bp, Helicobacter pylori
  CDS (51)...(1523)
ctgtattcgcttctgtggattactaccctcaaagaaaagaaagccacagaatgaacaccaccatcttagaagcttatgcggctgagccaagcaggcaaaccctctctaaagtcagcaaccgattcaaagagcatggcgctaaatttgatcttcgtgtgatggcaacgcatggaggcaccattagttggaaagctaaagaactcgctaggactattgtgagcggccctattggaggcgtgattggatctaaattgctaggcgaaacgcttggttatgacaatattgcatgcagtgatattggkggcacgagctttgatatggcgcttatcgttaagagcaattttaacatcgcttctgaccctgatatggcacgccttgttttatctctaccgcttgtggctatggattctgttggcgcaggtgctgggagttttgtgcgcattgatccacacagccgatctgtcaaactagggcctgacagcgcggggtatagagttggcacttgttggaaagacagcgggttagacacggtttcagtaaccgattgccatattgttttaggctatttgaacccggataatttcttaggcggtttgatcaaattagatgtggatagggctaaaaaacacattaaagaacaaatcgctgatccgctaggcattagcgtagaagatgcggctgctggtgtgattgaattgcttgatttggagcttaaagaatacttgcgatccaacattagcgctaaagggtatagcccatctgattttgtgtgcttttcatatggtggcgcaggacctgtgcatacctatggctatacagaaggattagggtttaaggatgtggtagtgcctgcgtgggcggctggatttagcgcttttggttgtgcttgcgctgattttgaatacagatacgacaagagcgtggatattgccattccgcagtattcttcagacaagtcaaaaatagacgcatgcaaaatcattcaagacgcatgggatgaattgactttgaaagtgattgaagagttcaagatcaatggattttctcaaaaagatgtgatcttaagacctggatacaggatgcagtatatggggcaattgaatgatttagagatcacttctcctgtgtcaaaagctgcaagcgtggctgattgggaagagattgtcaaagaatatgaaaaaacctacgctcgcgtttattctgaatcagcgtgttctccagagcttggttttagcgtgactggcgtgatcatgcgtggtgttgtggctacgcaaaaacctgtgattccggttgaaaaagagcatggtgctacgcccccaaaagaagccaaaataggcgttagaaaattctatcggcataaaaaatgggtggatgcagatgtgtggcaaatggaaaaattactgcctggaaatgaagtcataggacctgcgatcgtggaatcagatgcgaccactttcgtgatacccaaaggctttgcgacaagactagacaaacaccgattgttccacttgaaagaaattaaataaaggagttcaaaatggcaaatttattgaaaaacggcaaaactttaaaacaa

SEQ ID NO: 128 - protein, 491 aa, Helicobacter pylori
  VARIANT 84: Xaa = Any Amino Acid
MNTTILEAYAAEPSRQTLSKVSNRFKEHGAKFDLRVMATHGGTISWKAKELARTIVSGPIGGVIGSKLLGETLGYDNIACSDIXGTSFDMALIVKSNFNIASDPDMARLVLSLPLVAMDSVGAGAGSFVRIDPHSRSVKLGPDSAGYRVGTCWKDSGLDTVSVTDCHIVLGYLNPDNFLGGLIKLDVDRAKKHIKEQIADPLGISVEDAAAGVIELLDLELKEYLRSNISAKGYSPSDFVCFSYGGAGPVHTYGYTEGLGFKDVVVPAWAAGFSAFGCACADFEYRYDKSVDIAIPQYSSDKSKIDACKIIQDAWDELTLKVIEEFKINGFSQKDVILRPGYRMQYMGQLNDLEITSPVSKAASVADWEEIVKEYEKTYARVYSESACSPELGFSVTGVIMRGVVATQKPVIPVEKEHGATPPKEAKIGVRKFYRHKKWVDADVWQMEKLLPGNEVIGPAIVESDATTFVIPKGFATRLDKHRLFHLKEIK

SEQ ID NO: 129 - DNA, 303 bp, Helicobacter pylori
  CDS (52)...(261)
gtaagctagagtttatgcaaagggagatgagtagcctagaagctaagcattatgattcagttaaaatcaaatttggattggtacgcagattatttgaattttttagatcgctttggggaaaaaatggaagaatccaaagagcgaaaacaactcctgatcgcttcccttgcacctcttgcgggctttgctgcaagaatatcgccgggattattgagcttattgggtttgatgctggcaatggggtgtgcaaatttttggatttagaaaccaatctgtgcaagatttatgaatcgcgcccgttaa

SEQ ID NO: 130 - protein, 70 aa, Helicobacter pylori
MIQLKSNLDWYADYLNFLDRFGEKMEESKERKQLLIASLAPLAGFAARISPGLLSLLGLMLAMGCANFWI

SEQ ID NO: 131 - DNA, 826 bp, Helicobacter pylori
  CDS (51)...(773)
tggcttaattgttaagccggctagaaaaagagcgttatttgcgccatatcatgctagaagatgtgggcgaagagggtcaattgaagcttttaaaatctagcgttttagtcattggggctgggggtcttggatcggcggttttgatgtatttgtgtgccgctgggataggaaaaatcggtattgtagattttgatgtagtagatatgagtaatttgcaacgccaaatcatccattcacaggattttttaaaccaatctaaagcctctagcgcgaaagcgcgcttaaaacaactcaatgcgggtattgaaatagaggcttttgaagaacgctttaaggctcataacgctctttctctcatagagccttatgattttatcatagacgccacggacaattttaacgctaaatttttgatcaatgacgcttgcgtgttagcccaaaaaccctattcgcatgccggggttttagaatacagggggcaaagcatgagcgttttaccccatagcgcatgcttagcgtgcgtttttgataagccccctaaaaagggattaaatcccatttcagggctttttggggtcttacccggagttttagggtgtatccaagcgagcgaatgccttaaatattttttagggtttgaaactttacttataaatactttacttatagccgatattaaaacgatggattttaaaaaaattcaagcacccaaaaaccctgaatgtagggtttgtggcacgcataaaatcacgcatttacaggattatgaaatttagattaaggggtaagttttggatttatcaaccatattaggcttggtattggc

SEQ ID NO: 132 - protein, 241 aa, Helicobacter pylori
MLEDVGEEGQLKLLKSSVLVIGAGGLGSAVLMYLCAAGIGKIGIVDFDVVDMSNLQRQIIHSQDFLNQSKASSAKARLKQLNAGIEIEAFEERFKAHNALSLIEPYDFIIDATDNFNAKFLINDACVLAQKPYSHAGVLEYRGQSMSVLPHSACLACVFDKPPKKGLNPISGLFGVLPGVLGCIQASECLKYFLGFETLLINTLLIADIKTMDFKKIQAPKNPECRVCGTHKITHLQDYEI

SEQ ID NO: 133 - DNA, 547 bp, Helicobacter pylori
  CDS (51)...(494)
aaaattcattctattttagataatgagttcaatccccacaaacagcaagaatgaatcgcatgaataaaaattatcttttaatctttttgttgttagcgagtcttgttgctagagagaaggacgcttcttcaaacctttttgatttgattgataaggggatcaacagagaacaagaattaaaagagcaggagcaaaaaacgcgcttaaaactggctcaaagccctttagtagcgttagagattgtcccccaagaaacgccctatttagaatggcaaggggctagggagtcgtattatttaaaggtgagcgctgtagtggagagcgtggttatcttaaaaattgacatcaatcaagggcgttcttgctcgctctaccccacgcctaaaagcgtttctttagtgaggaatcaaagcgtagcctatgaaattttatgcgaaaaccaacccctatggatagaagtaagcaccaatttaggcaaacgcacctttcagttttaacctgcaaccaacattaaagaatgcctttagcattttaaaacccctttatc

SEQ ID NO: 134 - protein, 148 aa, Helicobacter pylori
MNRMNKNYLLIFLLLASLVAREKDASSNLFDLIDKGINREQELKEQEQKTRLKLAQSPLVALEIVPQETPYLEWQGARESYYLKVSAVVESVVILKIDINQGRSCSLYPTPKSVSLVRNQSVAYEILCENQPLWIEVSTNLGKRTFQF

SEQ ID NO: 135 - DNA, 1684 bp, Helicobacter pylori
  CDS (51)...(1631)
cctttctttattctcattgcatcttgtgggatcattttttttttttattaatgctagcttccatcatctcaattttaagggtttttgttttgttattcaacacgccgttattcatctttgcttttttgcctgttggttttttagggtattttatcttgcaagcttatgctaaaaatcccctgttccctaaactatggctagtattggctagtttgtttttttatgctttttggaatgtgaagtatttgcccttattggttggctctattgtttttaattattttgtggctttgaaaatccatcaaacccagccaaatgcatataaaagattatggcttattttgggcttgatcgctaatgtttcacttttaggatttttcaaatacactgattttttcttaaccaatttcaatctaatatggaagagccattttgaaaccttgcatttaatcttgcctttagcgatcagctttttcactttgcaacaaatcgcttacttgatggacacttataagcaaaatcaaatcatgcagcccaaaatgagagagagagtgagtgaaaacgctcctattttattaaatcctcccacttcatttttttcactttcgcattttttagattacgctttatttgtgagtttcttccctcaactcattgcagggcctattgtgcatcatagcgagatgatgcctcaatttaaagataaaaacaatcaatatttgaattacagaaatatcgctttaggcttgtttatcttttctatcggtttgtttaaaaaggtcgtgattgcagataataccgctcattttgctgattttggatttgataaggcgactagcttaagttttattcaagcatggatgacttctttatcttattcgttccagctgtattttgattttagcggttattgcgatatggctataggcattggcctcttttttaacatcaaactccctatcaattttaatagcccctataaggctttgaatatccaagatttttggaggaggtggcatatcactttgagccgcttcttaaaagagtatttgtatatccctttagggggtaatagggtgaaagaattaatcgtgtataggaatttaattttagtgtttttgattggggggttttggcatggggctggttggacttttatcatttgggggctattgcatgggattgctttgagcgttcatagagcgtattctcatgccactagaaaattccatttcactatgccaaagattttagcatggctcatcacttttaattttatcaatctcgcatgggtgttttttagagccaaaaatttagaaagcgctttgaaggttttaaaggggatggttggtttgaatggtgtttcgctttgtcatctttcaaaagaggcatcagagtttttaaatcgtgtcaatgataacatgatcatgcacaccataatgtatgcatcccccacatttaaaatgtgtgttttgatgataatcatctctttttgtttaaaaaatagttcccatttataccaatccaatcaaatggattggattaaaacaacaagcgcttgtttgttgctctctataggttttttatttatttttgccagttctcaatcggtatttttgtattttaatttttaggacactgctatggaattttataaaaaacaaactttaatcattgtttcttt

SEQ ID NO: 136 - protein, 527 aa, Helicobacter pylori
MLASIISILRVFVLLFNTPLFIFAFLPVGFLGYFILQAYAKNPLFPKLWLVLASLFFYAFWNVKYLPLLVGSIVFNYFVALKIHQTQPNAYKRLWLILGLIANVSLLGFFKYTDFFLTNFNLIWKSHFETLHLILPLAISFFTLQQIAYLMDTYKQNQIMQPKMRERVSENAPILLNPPTSFFSLSHFLDYALFVSFFPQLIAGPIVHHSEMMPQFKDKNNQYLNYRNIALGLFIFSIGLFKKVVIADNTAHFADFGFDKATSLSFIQAWMTSLSYSFQLYFDFSGYCDMAIGIGLFFNIKLPINFNSPYKALNIQDFWRRWHITLSRFLKEYLYIPLGGNRVKELIVYRNLILVFLIGGFWHGAGWTFIIWGLLHGIALSVHRAYSHATRKFHFTMPKILAWLITFNFINLAWVFFRAKNLESALKVLKGMVGLNGVSLCHLSKEASEFLNRVNDNMIMHTIMYASPTFKMCVLMIIISFCLKNSSHLYQSNQMDWIKTTSACLLLSIGFLFIFASSQSVFLYFNF

SEQ ID NO: 137 - DNA, 3973 bp, Helicobacter pylori
  CDS (51)...(3920)
aaagtcgcaccctttgtgcaaaaatcgttttacaagaagaaaggaaaaaaatggaaatacaacaaacacaccgcaaaatcaatcgccctttggtttctctcgctttagtaggagcgttagtcagcatcacaccgcaacaaagtcatgccgcctttttcacaaccgtgatcattccagccattgttggggggattgctacaggcgctgctgtaggaacggtctcagggcttcttggctgggggctaaaacaagccgaagaagccaataaaaccccagataaacccgataaagtttggcgcattcaagcaggaaaaggctttaatgaattccctaacaaggaatacgacttatacagatccctactatctagtaagattgatggaggctgggattgggggaatgccgctacgcattattgggtcaaaggcgggcaatggaacaagcttgaagtggatatgaaagacgctgtagggacttataatctctcagggctaagaaactttactggtggggatttagatgtcaatatgcaaaaagccactttgcgcttgggccaattcaatggcaattctttcacaagctataaggatagcgctgatcgcaccacgagagtggatttcaacgctaaaaatatcttaattgataattttttagaaatcaataatcgtgtgggttctggagccgggaggaaagccagctctacggttttaactttgcaagcttcagaagggattactagcagtaaaaatgcggaaatttctctttatgatggcgccacgctcaatttggcttcaaacagcgttaaattaatgggtaatgtgtggatgggccgtttgcaatatgtgggagcgtatttggccccttcatacagcacgataaacacttcaaaagtgacaggggaagtgaattttaaccatctcactgtgggcgatcacaacgccgctcaagcaggcattatcgctagtaacaagactcatattggcacactggatttgtggcaaagcgcgggactaaacattatcgcccctccagaaggcggttataaggataaacctaaggataaacctagtaacaccacgcaaaataatgctaacaacaaccaacaaaacagcgctcaaaacaatagtaacactcaggttattaacccacccaatagcgcgcaaaaaacagaaattcaacccacgcaagtcattgatgggccttttgctggtggcaaagacacggttgtcaatattgatcgcatcaacactaacgctgatggcacgattaaagtgggagggtataaagcttctcttaccaccaatgcggctcatttgcatatcggcaaaggcggtatcaatctgtccaatcaagcgagcgggcgcacccttttagtggaaaatctaaccgggaatatcaccgttgatgggcctttaagagtgaataatcaagtgggtggttatgctttggcaggatcaagcgcgaattttgagtttaaggctggtacggataccaaaaacggcacagccacttttaataacgatattagtttgggaagatttgtgaatttaaaagtggatgctcatacagctaattttaaaggtattgatactggtaatggtggtttcaacaccttagattttagtggcgttacaggtaaggtcaatatcaacaagctcattacggcttccactaatgtggccgttaaaaacttcaacattaatgaattggttgttaagaccaatggggtgagtgtgggggaatacactcattttagcgaagatataggcagtcaatcgcgcatcaataccgtgcgtttggaaactggcactaggtcaatcttttctgggggtgtcaaatttaaaagcggtgaaaaactggttatagatgagttttactatagcccttggaattattttgacgctaggaatattaaaaatgttgaaatcaccagaaaattcgcttcttcaaccccagaaaacccttggggcacatcaaagcttatgtttaataatctaaccctgggtcaaaatgcggtcatggactatagtcaattttcaaatttaaccattcagggggatttcatcaacaatcaaggcactatcaattatttggtccgaggcgggcaagtagccaccttgaatgtaggcaatgcggcagctatgttctttagtaataatgtggatagcgcgactgggttttaccaaccgctcatgaagattaacagcgctcaagatctcattaaaaataaagaacatgtcttattgaaagcgaaaatcatcggttatggcaatgtttctttaggcactaacagcattagtaatgttaatctaatagagcaattcaaagagcgcctagccctttacaacaacaataaccgcatggatatttgtgtggtgcgaaatactgatgacattaaagcatgcgggacggctatcggcaatcaaagcatggtgaataaccccgacaattacaagtatcttatcggtaaagcatggaagaacatagggatcagcaaaacagctaatggctctaaaatttcggtgtattatttaggcaattctacgcctactgagaaaggtggcaataccacaaatttacctacaaacaccactagcaatgtgcgttctgccaacaacgcccttgcgcaaaacgctcctttcgctcaacctagcgccactcctaatttagtcgctatcaatcagcatgattttggcaccattgaaagcgtgtttgaattggctaaccgctctaaagatattgacacgctttatgctaactcaggcgcgcaaggcagggatctcttacaaaccttattgattgatagccatgatgcgggttatgccagacaaatgattgataacacaagcaccggtgaaatcaccaagcaattgaatgcggccactaccactttaaacaacatagccagtttagagcataagacaagcagcttacaaactttgagcttgagtaatgcgatgatcttaaattctcgtttagtcaatctctccagaaggcacaccaataatattgactcattcgcccaacgcttacaagctttaaaagaccaaaaattcgcttctttagaaagcgcggcggaagtgttgtatcaatttgcccctaaatatgaaaaacctaccaatgtttgggctaacgctattgggggaacgagcttgaataatggcggcaacgcttcattgtatggcacaagtgcgggcgtagatgcctaccttaatggggaagtggaagccattgtgggcggttttggaagctatggttatagctcttttaataatcaagcgaactctcttaactctggagccaataacactaattttggcgtgtatagccgtatctttgctaaccagcatgaatttgattttgaagctcaaggggcgctagggagtgatcaatcaagcttgaatttcaaaagcgctctattgcgagatttgaatcaaagctataattacttagcctatagcgctgcaacaagagcgagctatggttatgactttgcattttttaggaacgctttggtgttaaaaccaagcgtgggcgtgagctataaccatttaggttcaaccaactttaaaagcaatagcaatcaagtggctttgaaaaatggctctagcagtcagcatttattcaacgctagcgctaatgtggaagcgcgctattattatggggacacttcatacttctatatgaacgctggagttttacaagaatttgctaactttggttctagcaatgcggtatctttaaacacctttaaagtgaatgccgcacacaatcctttaagtacccatgccagagtgatgatgggtggggaattaaaattagctaaagaagtgtttttgaatttgggctttgtttatttgcacaatttgatttccaatataggccatttcgcttccaatttaggaatgaggtatagtttctaaataccgctcttaaacccatgctcaaagcatgggtttgaaatcttacaaaa

SEQ ID NO: 138 - protein, 1290 aa, Helicobacter pylori
MEIQQTHRKINRPLVSLALVGALVSITPQQSHAAFFTTVIIPAIVGGIATGAAVGTVSGLLGWGLKQAEEANKTPDKPDKVWRIQAGKGFNEFPNKEYDLYRSLLSSKIDGGWDWGNAATHYWVKGGQWNKLEVDMKDAVGTYNLSGLRNFTGGDLDVNMQKATLRLGQFNGNSFTSYKDSADRTTRVDFNAKNILIDNFLEINNRVGSGAGRKASSTVLTLQASEGITSSKNAEISLYDGATLNLASNSVKLMGNVWMGRLQYVGAYLAPSYSTINTSKVTGEVNFNHLTVGDHNAAQAGIIASNKTHIGTLDLWQSAGLNIIAPPEGGYKDKPKDKPSNTTQNNANNNQQNSAQNNSNTQVINPPNSAQKTEIQPTQVIDGPFAGGKDTVVNIDRINTNADGTIKVGGYKASLTTNAAHLHIGKGGINLSNQASGRTLLVENLTGNITVDGPLRVNNQVGGYALAGSSANFEFKAGTDTKNGTATFNNDISLGRFVNLKVDAHTANFKGIDTGNGGFNTLDFSGVTGKVNINKLITASTNVAVKNFNINELVVKTNGVSVGEYTHFSEDIGSQSRINTVRLETGTRSIFSGGVKFKSGEKLVIDEFYYSPWNYFDARNIKNVEITRKFASSTPENPWGTSKLMFNNLTLGQNAVMDYSQFSNLTIQGDFINNQGTINYLVRGGQVATLNVGNAAAMFFSNNVDSATGFYQPLMKINSAQDLIKNKEHVLLKAKIIGYGNVSLGTNSISNVNLIEQFKERLALYNNNNRMDICVVRNTDDIKACGTAIGNQSMVNNPDNYKYLIGKAWKNIGISKTANGSKISVYYLGNSTPTEKGGNTTNLPTNTTSNVRSANNALAQNAPFAQPSATPNLVAINQHDFGTIESVFELANRSKDIDTLYANSGAQGRDLLQTLLIDSHDAGYARQMIDNTSTGEITKQLNAATTTLNNIASLEHKTSSLQTLSLSNAMILNSRLVNLSRRHTNNIDSFAQRLQALKDQKFASLESAAEVLYQFAPKYEKPTNVWANAIGGTSLNNGGNASLYGTSAGVDAYLNGEVEAIVGGFGSYGYSSFNNQANSLNSGANNTNFGVYSRIFANQHEFDFEAQGALGSDQSSLNFKSALLRDLNQSYNYLAYSAATRASYGYDFAFFRNALVLKPSVGVSYNHLGSTNFKSNSNQVALKNGSSSQHLFNASANVEARYYYGDTSYFYMNAGVLQEFANFGSSNAVSLNTFKVNAAHNPLSTHARVMMGGELKLAKEVFLNLGFVYLHNLISNIGHFASNLGMRYSF

SEQ ID NO: 139 - DNA, 1335 bp, Helicobacter pylori
  CDS (55)...(1284)
ttagtagaaattgaagcgatagccattaagtaatttattaaagggactatcagcatgaaaaaagaggtcgtggtcataggcggtgggattgtagggctttcttgtgcgtattctatgcacaagttagggcataaggtctgcgtgatagaaaaaaacgatggcgcaaacggcacttcttttgggaatgctgggcttatttctgcgtttaaaaaagccccactctcatgccctggtgtggtgttagacaccctgaagctcatgctcaaaaaccaagcccctttaaaattccatttcgggcttaatttaaagctctatcaatggattttaaaatttgtaaaaagcgcgaacgccaaatccacgcaccgcaccatggcgttgtttgaacgctacgggtggctgagtattgatatgtatcatcaaatgctaaaagacggcatggacttttggtataaagaagatgggcttttaatgatctacactctagaagaaagttttgaaaaaaagcttaaaacttgcgataacagcggcgcttataaaatccttagcgctaaagagaccaaagaatacatgcccgttgttaatgacaatatctgcgggagcgtgcttttaaccgaaaacgcgcatgtggatccgggcgaagtgatgcactctttgcaagaatatttacaaaatgttggcgtggagttcctttataatgaagaagtgatcgattttgagtttaaaaataacctcattgagggcgttatcacgcacaaggaaaaaatccaagcagaaacaatcattctagccactggggctaaccccactctcattaaaaaaaccaagaacgattttttaatgatgggggctaaaggatatagcatcacctttaaaatgcctgaagaattaaaacccaaaacctcttctttatttgcggatattttcatggcgatgaccccacgaagagacactgtaaggatcacttctaaattagaattaaacaccaacaacgctctcattgataaagagcaaatcgctaacatgaaaaagaatttagccgctttcacgcagccttttgaaatgaaagacgccatagagtggtgcggtttcagacccttaacccctaatgatattccttatttgggctatgacaaacgctataaaaacttaatccatgcgacagggctagggtggcttggcatcacttttggcccagccattggtaaaatcatcgccaatttgagccaagacggagcgaatgaaaaaaatgccgatattatgcttttttctgcattttttagggattaaggaatttcttttttaaaccctagtttattaaggagtttttatggaaac

SEQ ID NO: 140 - protein, 410 aa, Helicobacter pylori
MKKEVVVIGGGIVGLSCAYSMHKLGHKVCVIEKNDGANGTSFGNAGLISAFKKAPLSCPGVVLDTLKLMLKNQAPLKFHFGLNLKLYQWILKFVKSANAKSTHRTMALFERYGWLSIDMYHQMLKDGMDFWYKEDGLLMIYTLEESFEKKLKTCDNSGAYKILSAKETKEYMPVVNDNICGSVLLTENAHVDPGEVMHSLQEYLQNVGVEFLYNEEVIDFEFKNNLIEGVITHKEKIQAETIILATGANPTLIKKTKNDFLMMGAKGYSITFKMPEELKPKTSSLFADIFMAMTPRRDTVRITSKLELNTNNALIDKEQIANMKKNLAAFTQPFEMKDAIEWCGFRPLTPNDIPYLGYDKRYKNLIHATGLGWLGITFGPAIGKIIANLSQDGANEKNADIMLFSAFFRD

SEQ ID NO: 141 - DNA, 1579 bp, Helicobacter pylori
  CDS (51)...(1526)
aaaaacgctataagatagtcaaatacattcaataaatgcaaggggaaatcatggaacataaagaaatcgttataggggttgatctaggctctagaaagatttgcgcgatagtggctgaatttaaagaagggattttgcgcatcattggcacggcccatcaagactccaaagaaatcaattcaaaagccattaaaagagggcgtatcaatagccttgctcacgcttccaacgccattaaagaagtgattaatagcgctaaaaaaatggcaggtttgaacgctgatgaagacagaaataaccccatgccccattttggggaataccaccctaaaactaaggcgattgtttctttttctggggcttatactgaaagcattagagatgttaccggtgtagcgagcaccaaagataatgtggtaaccattgatgaaatcaatcgcgctatcaatagtgcatgcgctaaagcaggcttagataacgacaaacatattttgcatgctctcccctatcgcttcactttagacaaacaagaagtgaatgaccctttagggatgagcgggactcgcttggaagtctttatccacattgtctatacagaaaaaaacaacattgaaaatttagaaaaaatcatgatccaatctggggtagagattgaaaacatcgtgatcaattcttatgcagcctcgattgccaccttatctaatgatgaaagggaattgggcgtggcttgcgtggatatgggcggagagacatgcaaccttacgatttatagcggcaattccatacgctataacaaatatttgcccgtaggctctcaccatttaaccacggatttatcgcacatgctcaacaccccattcccttacgctgaagaagttaagatcaaatacggggatctttcttttgaaggcggcgaagaaacgccctctcaaaatgtccaaatccctaccaccggctcggatggccatgaaagccatattgtgccgcttagtgaaatccaaactatcatgagagaaagggctttagaaacttttaaaatcatccacaggagcattcaagatagcggcttagaagagcatttgggcggaggcgttgtgttaaccggtgggatggctttaatgaaagggatcaaagaattagccagaacccatttcactaattacccggtgcgtttggcagcccctgtggaaaaatacaatatcatgggcatgtttgaagatttgaaagaccctcgcttttcagtcgtagttggcttgattttatacaaagcaggggggcataccaattatgaaagagactctaaaggggttatccgctaccatgaaagcgatgattacacaagaacagcccatcaatcaagccctaccccccatatccattcatcgcccacagaaaggaatttgagcgatttaaaagcccctagtgctcctttaaacaccgctaaaaacgatgactttttacctataaaacccaccgaacaaaaaggtttttttaaaagtttccttgataagatttctaaattcttttaagatacagccatttctttatgcgataaaaacgccttgatggttatcaaaag

SEQ ID NO: 142 - protein, 492 aa, Helicobacter pylori
MEHKEIVIGVDLGSRKICAIVAEFKEGILRIIGTAHQDSKEINSKAIKRGRINSLAHASNAIKEVINSAKKMAGLNADEDRNNPMPHFGEYHPKTKAIVSFSGAYTESIRDVTGVASTKDNVVTIDEINRAINSACAKAGLDNDKHILHALPYRFTLDKQEVNDPLGMSGTRLEVFIHIVYTEKNNIENLEKIMIQSGVEIENIVINSYAASIATLSNDERELGVACVDMGGETCNLTIYSGNSIRYNKYLPVGSHHLTTDLSHMLNTPFPYAEEVKIKYGDLSFEGGEETPSQNVQIPTTGSDGHESHIVPLSEIQTIMRERALETFKIIHRSIQDSGLEEHLGGGVVLTGGMALMKGIKELARTHFTNYPVRLAAPVEKYNIMGMFEDLKDPRFSVVVGLILYKAGGHTNYERDSKGVIRYHESDDYTRTAHQSSPTPHIHSSPTERNLSDLKAPSAPLNTAKNDDFLPIKPTEQKGFFKSFLDKISKFF

SEQ ID NO: 143 - DNA, 1987 bp, Helicobacter pylori
  CDS (51)...(1934)
agcgcttgaaatttttagccatttatgacacgaatttagacgaattttacatgataagagtggcagggcttaaacaactctatgagcataaaatcgcctctaaaggcattgatggcgcaagccctgaagaacaattagaaaaaatcaagcattatttagcgcatgaaattgaagaaagggagttagaattccaaaaaatccaagccctactctttaaaaaagggctttgtatcaccccctataatgaattgaatttagagcaaaaagcgaaggctaaaacctattttaaagagcagctttacgcgttagttttgccttttaaattggattcttcacacactttcccgcctttagcgaatttgactttcgcgctttttgcccgcatcaaagacaaagaaacccaaattatctcctatgcgctcatcaaactcccctcttttatcttccgttttgtagagctagaaaaaggcttgtttgtgttagctgaagaaatcgtggaagcgcatttagaagaattgtttttagagcatgagattttagattgcatggcgtttagggtaacttgcgatgcggatattgctatcactgaagatgaagcgcatgattatgcagatttgatgagtaagagtttgaggaaacgcaatcaaggcgaaatcgtgcgcttgcaaacccaaaaagggagtcaagagcttttaaaaaccctcttagcgtctttaaggagttttcaaacccactcttacaaaaagcacaaactcaccggcatgcatatctataaaagcgcgatcatgctcaatttaggggatttgtgggaattagtcaatcatagcgattttaaagcgctcaaatcgcccaatttcacacccaaaatccaccctcatttcaatgaaaacgatcttttcaaatctatagaaaaacaggatctgttgctgtttcatccttatgaaagttttgagcctgtgattgatttaatagagcaagccgctagcgatccagccaccctttctatcaaaatgacgctttatcgtgtgggcaagcattcccccattgtcaaagctttgattgaagcggcgagcaagattcaagtgagcgttttagtggaattaaaagcgcgctttgatgaagagagcaatctgcactgggcaaaagctttagaaagggcgggcgcgttagtcgtttatggcgttttcaaactcaaagtgcatgctaaaatgctattgatcactaaaaaaacagacaaccaattacgccatttcacccatttaagcacgggcaattacaaccctttgagcgctaaagtctataccgatgtgagtttttttagcgctaaaaatgaaatcgctaacgacattatcaagcttttccattccttgctcactagcagcgcgactaatagcgcattagaaacgctttttatggcacccaaacaaatcaagcctaaaatcattgaactcattcaaaatgaaatgaatcaccaacaagaaggctatatcattttaaaagccaacgccctagtggatagcgaaatcattgaatggctctatcaagcctctcaaaaaggggttaaaattgatctcattattagagggatttgctgtttaaagccccaagtcaagggcttgagcgaaaatatcagggtgtattctatcgtggggaaatatttagaacatgcacgcatttattattttaaacatgaaaatatttatttttctagcgcggatttaatgcccaggaatttagaaaggcgcgtggaattgctcattccagccacaaacccaaagatcgctcataaattgttgcatattttagaaatccaactcaaagacaccttaaaacgctacgagttaaattctaaaggccgttacattaaagtttcaaaccctaacgatcctttaaattcgcaggattattttgaaaaacaagcccttaaaaccttttaagggttatcgttcaaatcataaaagataaggatttaaatgctttattcatt

SEQ ID NO: 144 - protein, 628 aa, Helicobacter pylori
MIRVAGLKQLYEHKIASKGIDGASPEEQLEKIKHYLAHEIEERELEFQKIQALLFKKGLCITPYNELNLEQKAKAKTYFKEQLYALVLPFKLDSSHTFPPLANLTFALFARIKDKETQIISYALIKLPSFIFRFVELEKGLFVLAEEIVEAHLEELFLEHEILDCMAFRVTCDADIAITEDEAHDYADLMSKSLRKRNQGEIVRLQTQKGSQELLKTLLASLRSFQTHSYKKHKLTGMHIYKSAIMLNLGDLWELVNHSDFKALKSPNFTPKIHPHFNENDLFKSIEKQDLLLFHPYESFEPVIDLIEQAASDPATLSIKMTLYRVGKHSPIVKALIEAASKIQVSVLVELKARFDEESNLHWAKALERAGALVVYGVFKLKVHAKMLLITKKTDNQLRHFTHLSTGNYNPLSAKVYTDVSFFSAKNEIANDIIKLFHSLLTSSATNSALETLFMAPKQIKPKIIELIQNEMNHQQEGYIILKANALVDSEIIEWLYQASQKGVKIDLIIRGICCLKPQVKGLSENIRVYSIVGKYLEHARIYYFKHENIYFSSADLMPRNLERRVELLIPATNPKIAHKLLHILEIQLKDTLKRYELNSKGRYIKVSNPNDPLNSQDYFEKQALKTF

SEQ ID NO: 145 - DNA, 616 bp, Helicobacter pylori
  CDS (51)...(563)
tataatatagattttattttagctaaaaatggcatgggttttagcaaggaatgggcttgaaaaatctctcaacacttctggtgtttttattcttttgtttagggtgtgtgagcaattttaatgaagacacttacacgctagacttagttttagaaaaaaagatccaagccagcaggaaaggtgaaatcacccaagataatgtgcctatcatcacggctatcgctacgcatttaaacgatgtggatagcggcacttactatgaccatgagtattttttagtggagattttcacgcaaaataacgactggatagatgatggctatatttcttatgaactttttggcacaaaacctataggctcagagcctttatgggtgcgagaaatcacaaaagatgaatttgatggcattttagaaaccacgaacaggtggagcagagcttttttgctcgcttttaacaaattggattatttagcggttcaagaagccaaactagagcttgatgcctatagtttgggcaagattgtttttaatttcgcttatcaagtccccctacctcaattttaatgcgcttagattacgccttattcagtcagcatttagtaaatagcagagaa

SEQ ID NO: 146 - protein, 171 aa, Helicobacter pylori
MGLKNLSTLLVFLFFCLGCVSNFNEDTYTLDLVLEKKIQASRKGEITQDNVPIITAIATHLNDVDSGTYYDHEYFLVEIFTQNNDWIDDGYISYELFGTKPIGSEPLWVREITKDEFDGILETTNRWSRAFLLAFNKLDYLAVQEAKLELDAYSLGKIVFNFAYQVPLPQF

SEQ ID NO: 147 - DNA, 2341 bp, Helicobacter pylori
  CDS (966)...(2291)
attgtgaattaggagtgagcgtgaatagtaatggcaataaagacaaacaacagcagaatgtaagcagtgggatttctcaaatctcattaaaaaaggtggcaacttttgatgaaaatggggcgagttttgagaatttaaattctatcaactttatttatggggctaatgggagcggtaagacaaccacttctagttttttaaaaaatctagctgaaaatgggattgaagacaagtttgctaatagtaaaatagcatggtataacaatgagagtttaaagattgaagtttataacaagcaatttaaagaagagcaattgagaaactctcaagttaaaggcatttttacgctcggtaaaaaaacgaacgagaatttagaaaaaattgaaagcaagaaagaatcaataaacaaagagaatgaaaagaaaataaaaaatgaagcaagcttgcaagttttaacacaaaaaaaggaaaaggaagaaaaggattttgctgataggtgttgggaaaaactttataagaaaaatgaagaggattttaaagaaacgctagaaggctttaagcgtaaagagaagtttaaagaaaaaatccttaaggaatttgaaaacgataaatacaatcaaagcgaaatagtagggttagaaaaattaaaggaaaaaattgagattgtttttggtgaaaaccaaacagaattggcactattggaatgcaatttaacagattttgattttattgaaaatcattctatttgggaacaaaaaattgtagggagtggtgatgcagccattgcagatttaataaaaagattaagcaatgaagattgggtagctcaaggtagagaatatataaaagataatagtatatgccctttctgtcaaaaagaaaccattaccgaagaatttaaaaaacaactagaatcttattttgatacaagttatcaagaatctattgaaacgatcaaggaaaagatggaagactacgcaagcagaaccgctggagcactggagcgacttgataagattgttgaaacagaacagaagaatcaacaaactaaattggacacagaaaatttgaaaataattattgaaactttgagaagtaaaatcaatgggaatcagcaaaagatgcttgataaaagtaaagaaatgagcagaaattttaagcttgatagcactaaaaacgagatagacgcaattaaagatttgattaaaaaggctaatgagcaaatagccaattataatgagatgataaaggatattgaaaaacagaaaaagagttgtaaggaacaaacttggaaatttctagtcaatgaatttaaaagtgatatacaagaatataataaaaagtattgcggtttggagaaaggaataaacaatttagagaaagcaattagtgaaaatcaagaagaggtaaagaaattagaaaatgaaattaaggaattagaaaaaactatggtaagcataaagcccattgtcaatgaaatcaatacgcttttaaaagggtatggattcgcgaattttagtttggcatgcactgaagatgaaaaattttatcgtattcaaagagaagatggtcaattagtaggagaaacactgagcgagggtgaagttactttcatcactttcttatattattatcatttagcaaaaggctctttagaagagaacgatatatcaaaaaataaggttttagtgattgatgaccccatttcaagtttggatagcaatatattgtttatagtgagtgttttagttaaagatcttatgaaagaagccatggaagaaaaaacaaacatcaagcaagttattatactaacccacaacacatatttttacaaggaaattacattagaatgtgatttaaaacgctatcaagggaaatattctttttggataattaaaaaggataataatgtttcaaaaattaaagattataaagaaaatcccattaaaaattcctatgaattgctatggcaagaagtaaaacaagcaaaagaaaataatgcttcttgggtatctttacaaaatgttatgcgaagaattattgagtattactttaggattttaggcggttttaaacataatgatagcttgagtgaatgttttgaaaatattgaagaaaaacgagtgtgtaattctttcatttcatggtttaatgatggctctcatgggatttcagatgatttgtttatgcaaagtcaagatacaagtattgagacatatttaaaagtttttgaaaaaatatttaaagaaaccggtcatgaagctcattataaaatgatgatgagaatgaagtaattgaattaaaaacaaggaataacatgcgaatcgtatttatgggaacg

SEQ ID NO: 148 - protein, 442 aa, Helicobacter pylori
MEDYASRTAGALERLDKIVETEQKNQQTKLDTENLKIIIETLRSKINGNQQKMLDKSKEMSRNFKLDSTKNEIDAIKDLIKKANEQIANYNEMIKDIEKQKKSCKEQTWKFLVNEFKSDIQEYNKKYCGLEKGINNLEKAISENQEEVKKLENEIKELEKTMVSIKPIVNEINTLLKGYGFANFSLACTEDEKFYRIQREDGQLVGETLSEGEVTFITFLYYYHLAKGSLEENDISKNKVLVIDDPISSLDSNILFIVSVLVKDLMKEAMEEKTNIKQVIILTHNTYFYKEITLECDLKRYQGKYSFWIIKKDNNVSKIKDYKENPIKNSYELLWQEVKQAKENNASWVSLQNVMRRIIEYYFRILGGFKHNDSLSECFENIEEKRVCNSFISWFNDGSHGISDDLFMQSQDTSIETYLKVFEKIFKETGHEAHYKMMMRMK

SEQ ID NO: 149 - DNA, 3793 bp, Helicobacter pylori
  CDS (51)...(3740)
ttatgtgggctacaacataggcttttgattaaacaaaataagggaaaaatatgataaaaaaagctagaaaattcataccattctttttaattggctccctcttagctgaagacaatggctggtatatgtctgtaggctatcaaatcggtggcacgcaacaattcatcaataacaaacaacttttagaaaatcaaaatatcatcaacagcgtaacccaaagcgcgatcaacattgcagggcctactaccggccttatcactttaagctctcaaaccgtcattgacgctttaggctatggcgtgagtaacactgttggcaaccaattagagggcatttctaatatcttgaatcaaattggcaaaagaaaagacttttattctagccgtcaaatctctagcatttcccaacaaatcatagggcttaaaggaagctctgatcccttaaaagcccattcttcacagatcacagccaaactcctttccaacacccaaagcgcgtttgatcagggcatcgcgctaagcactaacatcattagctctatcaatagcctaaaccctagcaacaacacccaagaggttaaaaaacagctccaaaacaccgcgcaatccatgacagaattgttgcaacaaattgaacacagcatcactaaaaccactagcaccacttacgcgcaatccttactctccaatctaaccgatgcggtgaatgcctctagcaataataccgcttatgtgagcgctcttgttaacgctttaaacactttaggggtaggggttttccccaccacaaccacaacgcatgtggtgttaaacccaccgggacaagtcgtattctatccaaccaattccattttaggctctacttcttcaaacagcaataaccaacaacaatacaacaacacccttttaatgaacaccttacaagggacattaagcgctaatactcaaaataaccccaatggttgcgccaatcaagtccagtgtttggagcaattcatccaaaatttagcccctttagccgcaacccccacttcaaacaaccaggccaaccagcaagtccaagccatcgctcaaaagcttcaaagcgttgctatcaacactttagacaacaatgcgatcaacaacaccacctataatttaaacaatttgcacaacgctttgaatttccaagcctatgaaagcacgatagaacaatacaataacgctttaaaacaaatttcttggatcagttttactgagcctaaaaacttactcaaaaacacttccaataactaccaaatcggcaccgttaccaacgctcaagggcaaaatatcagcgcctatgattgcatgactgctaccggaagcctttctagcaatgcttctagcgggatttcatgctcagccacaagctccacaagttccacaaatagctttgacaattctttagtcgctacctccaaagtccaaaccatcaacggcaaagagcagatcggcgtgaattcttttaaccttgtctctcaagtgtggagcgtttataattctttaaaaacttcagaagaaaatttgcaaaaaaacgccaatattttatgcgctaatgggacgcaatctgggacaagctcatgcaatagctcttcagggggtttgagcatcagcgggaacgcccaattgcaaaatattttaagccctactagtgggactaccactaatactcaagctaaaagcaacgctcccaaactaaaagcgatggtggtggtgaataatgaagaagaagctaaaacggccaatttagcccaaagcagcgggacaaccacacaatctcctaacagcacggtgatgggagctttaaacaccgtgttgcaaaatgtcagcaatttccaacaaagcattcaaaacgcttttcaaaaccaagaaagtaatatccaagcttgggcgaatgcgatttataacactaatgggagtcagtcgcaagagatgacacctaacaataaccaagatttacgcatccaattgagggcgaatttttaccagctcatcaataccattaaccagcaagtgcctacagacatgaatgctttaattaatcaaagccaacaaacccaacaaacaagcggatcagcaagcaataataacgcatgcgcgagtggaatgagtgggagtaatggtaactggtgctatcagcaatggtccgattctaaggcttattacagcgggttgcaaagcgctttagggtatcaaacgcaagcgacaactcaaagcgggagcaatggtgggaacagcatcacctacaatgtccaacaaatcacgctcactagtaatggtttgctcaaccaaatcatcacaaatcttaagagcgttaatggaggcaatggcgcgagtggtacaggcagtgggaatggcaccagtcaaatcaacacagcctaccagatgctcacagacgccagcgatgggaaattagggacttatagtagtagtagtggcagtaataacggctatacgccatgcaatagcaccaatgggagcaataaaacgagtgggaacaattgttatgaacccaacaaacaacaaaacgccaccaccgcaaccgccacaaccgacagcaatttacaaaaagtctataatgacgcccaaaaaatagccaacattatcgccagctctgggaacaataaaggcgttgaaaacggcttaaaacaattctttgaagcgttaaaaaataatagcagcagtctcagtaatttatgtggtaatggtagtagcggtagtagtggcactacttgctccggttggcttatcaaccttttaggggcaatccccaccaatggagtgagcgatacgaataatttaattaatctgctcactgaattcattaaaaccgccgggtttatccaaaataatgatagtagtgtatctactagtcttacaagcgcttttcaagccattacgagcgctatttctcaagggtttcaagccttacaaaacgatattagccctaatgcgattttaaccttgctccaagagattacttctaacaccaccaccattcagtcattctcgcaaaccttacggcagcttttaggggataaaacattctttatggcgcaacaaaagctcattgatgcgatgattaacgccagaaatcaggttcaaaacgcgcaaaatcaagccaataactacggctctcaacccgttttaagccagtatgcggccgctaaaagcacccaacatggcatgagcaatggtttaggggttggtttgggctataaatacttctttggtaaagcgagaaaattaggccttaggcattattttttctttgattacggctttagtgaaataggcctagccaatcaaagcgtgaaagcgaatatctttgcttatggggtaggcacggattttttatggaacttattcaggaggacttacaacactaaagcgttgaattttgggctatttgctggggtccaactgggcggcgcaacctggcttagctccttaaggcaacaaatcattgacaactgggggagtgctaatgacatccattcaacgaattttcaagtggcgctgaattttggggtgcgcaccaacttcgcggagtttaagcgttttgctaagaaattccacaatcaaggggtcatcagccaaaagagcgtggaatttgggatcaaagtgcctctcatcaatcaagcgtatttgaatagcgctggagctgatgtgagttacaggaggctttatactttttatatcaattacatcatggggttttaaaaaagggtgtgtcatggaaatcttacaattcatcggctatgggaatatgg

SEQ ID NO: 150 - protein, 1230 aa, Helicobacter pylori
MIKKARKFIPFFLIGSLLAEDNGWYMSVGYQIGGTQQFINNKQLLENQNIINSVTQSAINIAGPTTGLITLSSQTVIDALGYGVSNTVGNQLEGISNILNQIGKRKDFYSSRQISSISQQIIGLKGSSDPLKAHSSQITAKLLSNTQSAFDQGIALSTNIISSINSLNPSNNTQEVKKQLQNTAQSMTELLQQIEHSITKTTSTTYAQSLLSNLTDAVNASSNNTAYVSALVNALNTLGVGVFPTTTTTHVVLNPPGQVVFYPTNSILGSTSSNSNNQQQYNNTLLMNTLQGTLSANTQNNPNGCANQVQCLEQFIQNLAPLAATPTSNNQANQQVQAIAQKLQSVAINTLDNNAINNTTYNLNNLHNALNFQAYESTIEQYNNALKQISWISFTEPKNLLKNTSNNYQIGTVTNAQGQNISAYDCMTATGSLSSNASSGISCSATSSTSSTNSFDNSLVATSKVQTINGKEQIGVNSFNLVSQVWSVYNSLKTSEENLQKNANILCANGTQSGTSSCNSSSGGLSISGNAQLQNILSPTSGTTTNTQAKSNAPKLKAMVVVNNEEEAKTANLAQSSGTTTQSPNSTVMGALNTVLQNVSNFQQSIQNAFQNQESNIQAWANAIYNTNGSQSQEMTPNNNQDLRIQLRANFYQLINTINQQVPTDMNALINQSQQTQQTSGSASNNNACASGMSGSNGNWCYQQWSDSKAYYSGLQSALGYQTQATTQSGSNGGNSITYNVQQITLTSNGLLNQIITNLKSVNGGNGASGTGSGNGTSQINTAYQMLTDASDGKLGTYSSSSGSNNGYTPCNSTNGSNKTSGNNCYEPNKQQNATTATATTDSNLQKVYNDAQKIANIIASSGNNKGVENGLKQFFEALKNNSSSLSNLCGNGSSGSSGTTCSGWLINLLGAIPTNGVSDTNNLINLLTEFIKTAGFIQNNDSSVSTSLTSAFQAITSAISQGFQALQNDISPNAILTLLQEITSNTTTIQSFSQTLRQLLGDKTFFMAQQKLIDAMINARNQVQNAQNQANNYGSQPVLSQYAAAKSTQHGMSNGLGVGLGYKYFFGKARKLGLRHYFFFDYGFSEIGLANQSVKANIFAYGVGTDFLWNLFRRTYNTKALNFGLFAGVQLGGATWLSSLRQQIIDNWGSANDIHSTNFQVALNFGVRTNFAEFKRFAKKFHNQGVISQKSVEFGIKVPLINQAYLNSAGADVSYRRLYTFYINYIMGF

SEQ ID NO: 151 - DNA, 1259 bp, Helicobacter pylori
  CDS (48)...(1226)
taaggataaaatcaagcgattagcccgaattttaagagagtattaagatgaataaaaaagcgtattttggggagtttggagggagttttgtttcggagttgttagtgcctgcattaagagaattagaacaggcgtttgatgcgtgtttgaaagatgaaaaattccaaaaagaatattttcgtcttttaaaggattttgtgggccgtcctagccctttaaccttgtgtcaaaatatcgtttctaaccctaaagtcaagctttatttaaaacgagaggatttaatccatggcggggcgcataagactaatcaagccttagggcaagcccttttagcgaaaaaaatgggtaaaacaaggatcatcgctgaaacaggcgccggtcagcatggcgtggcgacggctatcgcttgcgcattattgaacttaaaatgcgtggtttttatgggatctaaagacatcaagcgccaggaaatgaatgtttttagaatgcacttattaggcgctgaagtgagagaggttaattcagggagcgcgacgcttaaagacgctgtgaatgaagccttaagagattgggcgagcagttacaaggacacgcattatttgctaggcacagccgccgggccacacccttaccccacaatggttaaaacctttcaaaaaatgataggcgatgaggttaaaagccagattttagaaaaagaaaaccgcttgcctgattatgtgatcgcatgcgttggaggggggtctaacgctatagggatattcagcgcatttttaaacgacaaagaagttaaactcataggcgtagagccggcgggtttagggctagaaaccaataagcatggggcgactttgaataaggggcgtgtggggattttgcatgggaataaaacctatcttttacaagatgatgaaggccagattgcagaaagccatagcattagcgccgggcttgattatccaggagtggggccagaacacagctatttaaaagaaagtgggcgtgcggtttatgaaagcgcaagcgatgctgaagcgctagaagccttcaagttgttgtgccaaaaagaaggcattatcccagcgctagaaagctcacacgccttagcgtatgccttaaagctcgctcaaaaatgcgaagaagaaagcatcatcgtagtgaatttaagcggcagaggggataaggatttaagcaccgtttataacgctttaaaaggaggtttaaaatgaggtatcaaaacatgtttgaaaccttaaaaa

SEQ ID NO: 152 - protein, 393 aa, Helicobacter pylori
MNKKAYFGEFGGSFVSELLVPALRELEQAFDACLKDEKFQKEYFRLLKDFVGRPSPLTLCQNIVSNPKVKLYLKREDLIHGGAHKTNQALGQALLAKKMGKTRIIAETGAGQHGVATAIACALLNLKCVVFMGSKDIKRQEMNVFRMHLLGAEVREVNSGSATLKDAVNEALRDWASSYKDTHYLLGTAAGPHPYPTMVKTFQKMIGDEVKSQILEKENRLPDYVIACVGGGSNAIGIFSAFLNDKEVKLIGVEPAGLGLETNKHGATLNKGRVGILHGNKTYLLQDDEGQIAESHSISAGLDYPGVGPEHSYLKESGRAVYESASDAEALEAFKLLCQKEGIIPALESSHALAYALKLAQKCEEESIIVVNLSGRGDKDLSTVYNALKGGLK

SEQ ID NO: 153 - DNA, 601 bp, Helicobacter pylori
  CDS (197)...(547)
  misc_feature 159: n = A,T,C or G
tggtgatgcaaaaccaaaacaagcgcatcatgaattacattcctattaagttgaatttaagtggggtgatcccccctattttcgcttcagctttgctcgtgttcccttctacgattttgcagcaagccacaagcaacaaaaccttgcaagcggttgcgnattttttaagcccgcaaggtatgcgtataatattttgatgttcttgctcatcatcttttttgcttacttttattcttctattgtgttcaattctaaggatattgcggataatttgaggcgtaatggcgggtatattccagggcttaggcctggagaggggacttcatcgtttttaaattctgtagcgagtaagctcactttgtggggttcattgtatttagcgctcatttctaccgtgccttggattttggttaaggctatgggcgtgcctttttactttggaggcacagcggtgctgattgtggttcaagtcgctattgacaccatgaaaaagattgaagcgcaaatttatatgagcaagtataaaactttaagcgcggtaggcttttaatggcaatctctattaaaagcccaaaagaaatcaaagctctaagaaaagccg

SEQ ID NO: 154 - protein, 117 aa, Helicobacter pylori
MFLLIIFFAYFYSSIVFNSKDIADNLRRNGGYIPGLRPGEGTSSFLNSVASKLTLWGSLYLALISTVPWILVKAMGVPFYFGGTAVLIVVQVAIDTMKKIEAQIYMSKYKTLSAVGF

SEQ ID NO: 155 - DNA, 725 bp, Helicobacter pylori
  CDS (64)...(675)
gaaaacaggataacgcatgaaacatgtgagtagggattttgataccggttgggttgcgtatcaatgactctaggcattgatgaagcgggtagggggtgtttggccggttcgctttttgtggctggggtggcgtgtaatgaaaaaacagccttagaatttctaaaaatgggtttaaaagacagcaagaagctcagcctaaaaaagcgctttttcttagaatataagatcaaaacgcatggtgaggtggggtttttcgtggttaaaaaaagcgcaaatgaaattgatagcttgggcttaggggcgtgtttgaaactcgctgtgcaagaaattttagaaaatggttgctctttagttgatgaaataaaaatagacggcaacacggcgtttggcttgaacaaacgctacccccatatacaaaccatcatcaagggcgatgaaacaatcgctcaaatcgctatggcgtctgttttggcgaaagcttttaaggacagagaaatgctagagttgcacgctttgtttaaggaatacggctgggataagaattgcgggtatgggactaaacaacatatagaagcgatcattaagctaggggctacgccttttcatcggcatagcttcacgcttaaaaaccgcatcttaaatcccaaactcttagaggtggaacaacgccttatttaaaagggcgctgagatgggtagcgctcgctgaagaaaggtcgatgcgtt

SEQ ID NO: 156 - protein, 204 aa, Helicobacter pylori
MTLGIDEAGRGCLAGSLFVAGVACNEKTALEFLKMGLKDSKKLSLKKRFFLEYKIKTHGEVGFFVVKKSANEIDSLGLGACLKLAVQEILENGCSLVDEIKIDGNTAFGLNKRYPHIQTIIKGDETIAQIAMASVLAKAFKDREMLELHALFKEYGWDKNCGYGTKQHIEAIIKLGATPFHRHSFTLKNRILNPKLLEVEQRLI

SEQ ID NO: 157 - DNA, 2821 bp, Helicobacter pylori
  CDS (58)...(2769)
gattaatcagtggaagaatacaaagacaccctaaacttaaacacaaccaccttttctatgaaggggaatttgagcgttaatgagcctaaaacttacgccaaatggcaagagcaacaagcgtttaaacgcatgcaagctaggaaagacaaccatggggatttcactttgcatgacgggccgccttatgcgaacgggcatttgcatttggggcatgccttaaataaaattttaaaagacattgtcgttaaaagagaatattttaaggggaagaaaatctattacacgcccggttgggattgccatggtttgcccattgagcagcaaattttagagcgattagaaaaagaaaaaacaagcctagaaaaccccacgctgtttagagaaaagtgccgagatcatgcgaagaaatttttagaaatccaaaagaatgaatttttgcaattgggtgttttgggggattttgaagatccttataaaaccatggattttaaatttgaagcgagcatttatagagccttagtggaagtggctaaaaaagggcttttgaaagagcgccacaagcctatttattggagttatgcatgcgagagcgctttagcggaagctgaagtggaatacaaaatgaaaaaatcgccctccattttcgtggcgtttggtttgaaaaaggagagtttagaaaaattaaaagtcaaaaaagcgagcttggtgatttggacgaccacgccttggactttgtatgcgaatgtagcgatcgctttgaaaaaagacgctgtttatgcgctcacccaaaaaggctatttagtcgctaaagccttgcatgaaaaattagccgctttaggggtggtggataatgagatcacacatgaattcaattccaatgatttagaatatttagtggctacaaacccgctcaatcaaagggattcgctggtggctttaggagagcatgtcggtttagaagatggcacaggagccgtgcataccgcacctgggcatggtgaagaggactattatttaggcttaagatataatttagaagtgttaatgtctgtagatgagaaaggttgctatgatgagggcattatccataaccaactattagatgaaagctatctgggcgagcatgtttttaaggctcaaaaacgcattatagagcaattgggcgattctttattgctagagcaagagattgagcattcttatccgcattgctggaggacgcacaagcctgtgatttacagagcgactacgcaatggtttattttaatggatgagccttttatccaaaatgatggctctcaaaaaaccttaagagaagtggctttagatgcgattgaaaaggtggaatttgtgccaagcagcgggaaaaaccgcctaaaaaccatgatagaaaaccgccctgattggtgcttgagccggcaaagaaaatggggcgtgccactggcctttttcatagacaaacgcacgaataagccttgttttgaaagcgaagttttagagcatgtggccaatctttttgagaaaaaaggctgtgatgtgtggtgggagtatagcgtgaaagatttattgccccctagctatcaagaggacgccaagcattatgagaaaatcatgcacattttagacgtgtggtttgatagtggtagcacctttaaggcggttttagaagactatcatggagaaaaagggcaaagccctagcgatgtgatcttagaagggagcgatcagcatagggggtggtttcaaagctcgcttctaatcggttgtgttttaaacaaccaagccccttttaaaaaggtcattacgcatggctttatcgtagatgaaaagggcgaaaaaatgagtaaatctaagggcaatgtggtgtctttggacaagctgctcaaaacgcatgggagcgatgtggtgcgtttgtgggtagcgtttaatgactatcaaaacgatttgagagtctctcaaacctttttcactcaaacagaacaacattataaaaaattccgcaacaccctgaaattcttactcgctaattttagcgatatggatctcaagaatttagaacgcccccataacttcagccctttagatcattttatgttagagactttagaaaccataagcgctggagtcaatagcgcgtttgaagagcatgattttgtgaaaggcttgaatattttaatggcgtttgttaccaatgaattgagcgggatttatttagacgcttgcaaggatagcttgtattgcgatagcaaaaacaatgaaaaacgccaagccattcaaatggttttactcgctacagctagtaagttgtgctactttttagccccgattttaacgcacacgattgaagaagttttagagcatagccaagcgcttcgcatttttttacaagccaaagatgtgtttgatttaaaagacattagcgtttcagaaaaactccacctcaaagagtttaaaaaaccagaaaattttgaagccgttttagccttgcgttctgcctttaatgaagagttagaccgattgaaaaaagaaggcgtcattaaaaattcgttagagtgcgctattgaagtaaaagaaaaagcgttggatgaaaatttagtagaagagttgctgatggtaagctttgtggggattgcaaaagaaaaattgagtgaaacgccagcattcacgctctttaaagcccccttttataaatgccccaggtgttggcgttttaaaagcgagctagaaaacaccccttgcaagcgttgcgaacaggttttaaaagagcgatgataaaaggatagggcttttgaaaactttacaaacccatagagttttacaa

SEQ ID NO: 158 - protein, 904 aa, Helicobacter pylori
MKGNLSVNEPKTYAKWQEQQAFKRMQARKDNHGDFTLHDGPPYANGHLHLGHALNKILKDIVVKREYFKGKKIYYTPGWDCHGLPIEQQILERLEKEKTSLENPTLFREKCRDHAKKFLEIQKNEFLQLGVLGDFEDPYKTMDFKFEASIYRALVEVAKKGLLKERHKPIYWSYACESALAEAEVEYKMKKSPSIFVAFGLKKESLEKLKVKKASLVIWTTTPWTLYANVAIALKKDAVYALTQKGYLVAKALHEKLAALGVVDNEITHEFNSNDLEYLVATNPLNQRDSLVALGEHVGLEDGTGAVHTAPGHGEEDYYLGLRYNLEVLMSVDEKGCYDEGIIHNQLLDESYLGEHVFKAQKRIIEQLGDSLLLEQEIEHSYPHCWRTHKPVIYRATTQWFILMDEPFIQNDGSQKTLREVALDAIEKVEFVPSSGKNRLKTMIENRPDWCLSRQRKWGVPLAFFIDKRTNKPCFESEVLEHVANLFEKKGCDVWWEYSVKDLLPPSYQEDAKHYEKIMHILDVWFDSGSTFKAVLEDYHGEKGQSPSDVILEGSDQHRGWFQSSLLIGCVLNNQAPFKKVITHGFIVDEKGEKMSKSKGNVVSLDKLLKTHGSDVVRLWVAFNDYQNDLRVSQTFFTQTEQHYKKFRNTLKFLLANFSDMDLKNLERPHNFSPLDHFMLETLETISAGVNSAFEEHDFVKGLNILMAFVTNELSGIYLDACKDSLYCDSKNNEKRQAIQMVLLATASKLCYFLAPILTHTIEEVLEHSQALRIFLQAKDVFDLKDISVSEKLHLKEFKKPENFEAVLALRSAFNEELDRLKKEGVIKNSLECAIEVKEKALDENLVEELLMVSFVGIAKEKLSETPAFTLFKAPFYKCPRCWRFKSELENTPCKRCEQVLKER

SEQ ID NO: 159 - DNA, 339 bp, Helicobacter pylori
  CDS (70)...(288)
tgtagaatgaaatcctagccagtgagctagaatttaaatttttaatcaaaggagtcatcatggcacaccatgaagaacaacacggcgggcaccaccaccaccatcaccacacacaccaccaccactatcatggcggtgaacaccaccatcaccaccacagctctcatcatgaagaaggttgttgcagcactagcgacagtcatcatcaagaagaaggttgctgccacgggcatcacgagtaatatcggtgtggctaggggcaacttgactagggttgtctctggcttttgactttaaaatacaatcattccattctaacccattctgatcaaacccgtt

SEQ ID NO: 160 - protein, 73 aa, Helicobacter pylori
MKNNTAGTTTTITTHTTTTIMAVNTTITTTALIMKKVVAALATVIIKKKVAATGITSNIGVARGNLTRVVSGF

SEQ ID NO: 161 - DNA, 787 bp, Helicobacter pylori
  CDS (51)...(734)
gttttctacttatgattttgtggaagaatattgcaaattaaaggaaatgcatgcttgaaaaagtgtttcaagaaattaccaataaaagaaagttttttgcaagttctagcacaggggagcagtttgaaaaccaatttaggaatgaattaaaaaaacactttagcgaaatcaatggcgatttaacagaagaattaagccatattgaagaaaagcctaataaagaaatcaaaaccacttttaaccaactcaaaaagcaagttttagaaaaaaatcacccgcacacccttaaaaaccctttttcaaaccttacaagccattttttataccagccttttggctcacaaaattaccctgattttttggtttttatttttgactatgtggtggggattgaaatcaagttttctaaaaacgataagggtgaaaaaaatcttcaaacatctcgccccatgtggaattcaaacctgcctaaacccaatgcgatttatgtgtatggagtcgctaatgcaaacatcactttttttaaaggctcagatattttgagttatgaaaccagagaggtcttgctcaagtattttgatattttagataaagatgaaagaagtttgaaaaacgccttaaaggatttagaaaacccttttgggtttgccccctacatcagaaaagcttatgagcataaaaggaattttctaaccaccaccagattgaaagcttcttttcgcccaaccacattttaagagagcggaatgtcttggaatttttgaaaacgctcactcattagcgtatt

SEQ ID NO: 162 - protein, 228 aa, Helicobacter pylori
MLEKVFQEITNKRKFFASSSTGEQFENQFRNELKKHFSEINGDLTEELSHIEEKPNKEIKTTFNQLKKQVLEKNHPHTLKNPFSNLTSHFLYQPFGSQNYPDFLVFIFDYVVGIEIKFSKNDKGEKNLQTSRPMWNSNLPKPNAIYVYGVANANITFFKGSDILSYETREVLLKYFDILDKDERSLKNALKDLENPFGFAPYIRKAYEHKRNFLTTTRLKASFRPTTF

SEQ ID NO: 163 - DNA, 540 bp, Helicobacter pylori
  CDS (53)...(493)
ccaaacccttttgaaacacttgctcactaacccattataagccgcaaaaaccatgctctctttaaaacaagattccttttttttcttatgtttaggaatcctggggttttatttttatagccttttgagggatttaatgccttttttacccccaatgattgggtttttattcttgttttatgcgaaaaaatacgatcattttttacccagtttgagcgtgtttggttgtttgttttggtttgagagcatgcatttaaagactttaggcgttttagctttattgtttttaatctaccatcaaatcgcctataaaaactctttaaagctttttaatgacggctttttattcaaaactttgcatgtttttttggtttattacctttatttatcgcgctttttttcgatgtctttgagtttgaaaatactcggctttctcgctctttttgctttaatagaaagcgctttgtggggtttgtatgaaaaatcttcgctataagcttttgctctttgtttttatagggttttgggggttactagcct

SEQ ID NO: 164 - protein, 147 aa, Helicobacter pylori
MLSLKQDSFFFLCLGILGFYFYSLLRDLMPFLPPMIGFLFLFYAKKYDHFLPSLSVFGCLFWFESMHLKTLGVLALLFLIYHQIAYKNSLKLFNDGFLFKTLHVFLVYYLYLSRFFSMSLSLKILGFLALFALIESALWGLYEKSSL

SEQ ID NO: 165 - DNA, 1888 bp, Helicobacter pylori
  CDS (51)...(1835)
cactaaagtcaatccaagcgcaagttggatgaaaaaataagaaggaagttatgaaaaagtcattcaaaaaattaggctttgtctctttagcggctagtggcgtgcttttagggagcatgaacgctaccgatttagaaacctacgcagcattgcaaaaatcatcgcatgtttttggtaattatgctgaaaaggataaggatagtaaattaacaagcgattcaccaacgcaacaacaagatcaaaaagtagcccaaaacaccgcttcaaacgacagccaagaagcgacaacacttgaaaacaccgcttctactgacaacacaaccgccacaactgatgaaacttatacaaaaagcactgacactactgtagctggtgcggctcaaaaagtagaaaccgataacacagccgttcaaagcgctgaacaaactttaaaaacagatgtagctaaagttcaagctgatgctagtgctaaagattttgatgaaaccacttttcaagccgatcaagcagcagagcaaaccgctgaaaaagctttacaacaggctgagagcaaactcaacaccgatcaacagactttaaacacagcgttacaagatcagacgaaaacaccaaccccatcaaccccaccaactaaagaggaaccaaaacacaccgcttcaagcggcacaccaccagctccagaaagcccaccagctaaaaaagatgaaacaagtggcacaccaagtgctagtgggagttctgtggcaagccagctaaccaaagataccactatggttaataatcttaagagtgtgagcgtgagcgcgatgaacaccactttaagtggagtagaaaccatgtctcaacaaactgcaacgattggcaaccttttgaatagtagcaccgatttaagcagtgtgattcccaacgctcaagggctaaacagcgcgtttagcacattagaaagcgctcaaaacactctaaaaggctatttaaattcttctagcgcgacgattgggcaattgacaaacggatctaatgcggttgtgggcgcgttagataaagctatcaatcaagtggatatggctttggccgatcttagtgcagctgatacgcaaaaaacgcaagccgttacgcttgcaactgctagtgatagtccaacgacaacgacagatgccatcaatttcttaaacgcgctaaaaagcaatctaatggctcaaaaagacgcttttttgaatgtgcataaaaacattcaaaccgctgtcgctcaagcccaggaaacctacacgccaagcgtgatcaacaccaataattacgggcaaatgtatggggtagatgcgatggcagggtataagtggttctttggcaaaaccaaacgctttggctttaggtcttatggatactacagctataaccatgcgaatttaagctttgtggggagccagcttggaatcatggagggcgcgtctcaagtgaataacttcacttatggcgtgggctttgatgtgctctataacttctatgaaagcaaagagggctataacacagcagggttgttcttaggctttgggttaggaggggattcgtttatcgttcaaggagagagctacttgaaatctcaaatgcacatttgcaacaacaccgccggctgttcagcgagcatgaacacaagctacttccaaatgcctgttgaatttggttttaggagcaatttctctaaacacagcgggattgaagtgggctttaaattgcctttattcaccaaccaattctataaagaaaggggcgtagatggatcggtagatgtgttctataaaaggaatttctctatttattttaactacatgatcaacttctaagcctttctattctttccaatagagggttttctctctgttggtttcttttt

SEQ ID NO: 166 - protein, 595 aa, Helicobacter pylori
MKKSFKKLGFVSLAASGVLLGSMNATDLETYAALQKSSHVFGNYAEKDKDSKLTSDSPTQQQDQKVAQNTASNDSQEATTLENTASTDNTTATTDETYTKSTDTTVAGAAQKVETDNTAVQSAEQTLKTDVAKVQADASAKDFDETTFQADQAAEQTAEKALQQAESKLNTDQQTLNTALQDQTKTPTPSTPPTKEEPKHTASSGTPPAPESPPAKKDETSGTPSASGSSVASQLTKDTTMVNNLKSVSVSAMNTTLSGVETMSQQTATIGNLLNSSTDLSSVIPNAQGLNSAFSTLESAQNTLKGYLNSSSATIGQLTNGSNAVVGALDKAINQVDMALADLSAADTQKTQAVTLATASDSPTTTTDAINFLNALKSNLMAQKDAFLNVHKNIQTAVAQAQETYTPSVINTNNYGQMYGVDAMAGYKWFFGKTKRFGFRSYGYYSYNHANLSFVGSQLGIMEGASQVNNFTYGVGFDVLYNFYESKEGYNTAGLFLGFGLGGDSFIVQGESYLKSQMHICNNTAGCSASMNTSYFQMPVEFGFRSNFSKHSGIEVGFKLPLFTNQFYKERGVDGSVDVFYKRNFSIYFNYMINF

SEQ ID NO: 167 - DNA, 1467 bp, Helicobacter pylori
  CDS (46)...(1416)
tttaagaaactatttgcgcatttgatgttaaggtttctctaaagcatgcgttattttcttgtagttttcttgtttttgtttgtgggttgcacaaaaaaggatttcacgctcaaagatttatccttgccccaagaggcttcaagctatcttgcatctcaaaatggcagtaacaacaaccaaagcattgacccccaagcgttaagagaaaatctgaaagagagctatctcaaagcgtggtattccccatggctagatatgaaagtcaaaagcaataaaaaagaagtgttttggatccttaaggagatgaataaatccaccggttatggcgaagatctaaaacccaacgcaaaagctttcaatgacgcactcattaagagcatggatattgagcattaccctagcgttaagattagggctgttgtagcgcgagatagcgatgtgagggctgtgcctactaacaaaccttattatctttctcaaaaaggctatccttttgataggtatcaaaattcgctgatttttcaaggcacgccggttttaatcacgcattttaatctagataaaacttatgcccacattcaaagcagttttgtttatggctggatcaaagttagcgatttagtctacatgcacgataaagacatagagcttttaacccatcttaaagattatgtcatgcctataaaagataaaatccccctttatacagactatggggatttttacaccaacgccagagtgggcgaattgttcgctctcatcccccaaagtcaaaaaacacctcaaaaaccccaaaaaaaggaattgaaagcctatggttttttgagagacgctaagggttatgcagctttacaaagcgtgatcttagaagaaaaggatttttttgttttccctaaggcttttaacagcgagaacatggcgtattttatagacaccatgttagggcaaaaatacggctggggcgggctattgggtaatagggattgctcggctttcaccagagatagttttgctaattttggtattttgctccccagaaattcctatgcgcaaagccgttatgcgaacaattatgtggatttaagctctatgaaagccaaagaaaaagaagactacatccttaaaaacgccacgccttttggaacgctcatctatttaaaagggcatatcatgctttatttaggcgcacacaaccatcaagcgatagtcgctcacagcatttggtcggtgcaaacccaaaagcattttaaaaccttgagccataaaataggaggcgtggtgatcacttcgttatggttagctgaagagcataatggggcgttttctaaaaagaaattattgattgatagggtgcttggaatgagcgatttgaaagattttgtcaataaaacttcaagccctttaaatgcgaattgattttcttatattatgattacgatttatcaatttaaaacatttggagaaaga

SEQ ID NO: 168 - protein, 457 aa, Helicobacter pylori
MRYFLVVFLFLFVGCTKKDFTLKDLSLPQEASSYLASSQNGSNNNQSIDPQALRENLKESYLKAWYSPWLDMKVKSNKKEVFWILKEMNKSTGYGEDLKPNAKAFNDALIKSMDIEHYPSVKIRAVVARDSDVRAVPTNKPYYLSQKGYPFDRYQNSLIFQGTPVLITHFNLDKTYAHIQSSFVYGWIKVSDLVYMHDKDIELLTHLKDYVMPIKDKIPLYTDYGDFYTNARVGELFALIPQSQKTPQKPQKKELKAYGFLRDAKGYAALQSVILEEKDFFVFPKAFNSENMAYFIDTMLGQKYGWGGLLGNRDCSAFTRDSFANFGILLPRNSYAQSRYANNYVDLSSMKAKEKEDYILKNATPFGTLIYLKGHIMLYLGAHNHQAIVAHSIWSVQTQKHFKTLSHKIGGVVITSLWLAEEHNGAFSKKKLLIDRVLGMSDLKDFVNKTSSPLNAN

SEQ ID NO: 169 - DNA, 235 bp, Helicobacter pylori
  CDS (51)...(182)
cttttactttataattatcgttggcattttaatattcaaaggagcttgaaatgagaatttctcttttagctgtaattttagcgttattgtttgtggcttgccacgaaactaaaaaacaaatcttacaaaacgaagccgatagcaccccttcagaaaaaaccatttggcaacctgaacaaaaataaaaattgtaaaaatactcaaaggcattttttaaaataaacgcaataaaaaa

SEQ ID NO: 170 - protein, 44 aa, Helicobacter pylori
MRISLLAVILALLFVACHETKKQILQNEADSTPSEKTIWQPEQK

SEQ ID NO: 171 - DNA, 1351 bp, Helicobacter pylori
  CDS (51)...(1298)
ccagcgatgcgtcctgttaaaaacgattttaatgtggagagtgaagaataatggcgtattttttagaacaaacggatagtgaaatttttgagcttatctttgaagaatacaagcggcaaaatgagcatttagaaatgatagcgagcgagaattacacttttgcaagcgttatggaggctatggggagtgttttaacgaataaatacgctgaaggctaccctaacaagcgctattatggaggctgtgaagtggtggataaaatagaaagcctagccatagaaagggctaaaaagctttttaattgccagttcgctaacgtgcaagcgcattcaggctcacaagccaataacgctgtctatcacgctcttttaaagccttatgacaagattttaggcatggatttaagctgtggagggcatttaacgcatggcgctaaagtgagtttaaccggcaagcattatcagagcttttcttatggcgtgaatttggatggctatattgattatgaagaggcgctaaaaatcgctcaaagcgttaagccagaaatcatcgtgtgcgggttttcagcctatccaagggagattgattttaagaaatttagagaaatcgctgatgaagtgggggcgttactattaggcgatatagcccatgtggcagggcttgtggtaaccggtgagcatgcccatcctttcccgcattgccatgtggtttcaagcaccactcataagaccttaagagggcctagaggggggattattttaactaatgatgaagagatagcggctaagattgacaaagcgatttttccaggaactcaaggcgggcctttgatgcatgtgattgctgctaaagcggtgggttttaaagagaatctaaaaccagaatttaaagcttatgcacaattagtgaaatctaacatgcaagttttggctaaagcgttaaaagaaaaaaaccataagttagtgagtggtggcacttctaaccatttgcttttaatggattttttagataagccttatagcgggaaagacgctgatattgcattagggaatgccggaatcaccgtgaataaaaacaccattcctggtgaaacgcgcagcccttttgtaacgagcgggataaggattggctcagcggcattgagcgcaaggggcatgggagctaaggaatttgaaatcatagggaataaaatatcagatattttgaatgatattaataatgttagtttgcaattgcatgtgaaagaagaattgaaagccatggtcaatcaattccctgtgtaccaccaacctattttttaagggagtcaagatgacagaaatggaattaaagctcattaagatagacacaa

SEQ ID NO: 172 - protein, 416 aa, Helicobacter pylori
MAYFLEQTDSEIFELIFEEYKRQNEHLEMIASENYTFASVMEAMGSVLTNKYAEGYPNKRYYGGCEVVDKIESLAIERAKKLFNCQFANVQAHSGSQANNAVYHALLKPYDKILGMDLSCGGHLTHGAKVSLTGKHYQSFSYGVNLDGYIDYEEALKIAQSVKPEIIVCGFSAYPREIDFKKFREIADEVGALLLGDIAHVAGLVVTGEHAHPFPHCHVVSSTTHKTLRGPRGGIILTNDEEIAAKIDKAIFPGTQGGPLMHVIAAKAVGFKENLKPEFKAYAQLVKSNMQVLAKALKEKNHKLVSGGTSNHLLLMDFLDKPYSGKDADIALGNAGITVNKNTIPGETRSPFVTSGIRIGSAALSARGMGAKEFEIIGNKISDILNDINNVSLQLHVKEELKAMVNQFPVYHQPIF

SEQ ID NO: 173 - DNA, 1513 bp, Helicobacter pylori
  CDS (51)...(1460)
tgaaaaaccactcctttaaaaaaacgatcgctctttccttactagcgagcatgtctttgtgcagggctgaagaagatggggcgttttttgtcatagattaccagacgagtttggccagacaggaattgaaaaatccaggcttcacccaagcgcaagaattaaggcagttgatcagagatggggctgtgaggttgcaaacttctgccattcccttatcctactacttggatattttagggaataaaacagcaactcttttgcgtgaaagcctgaaaaacaatgcacaaccatcacaaccaaacgcgcaaccaccgcaacaaaacggaccatcaaaccaagccttagccaatttagagcaatctctagggattttaggaaaactattggatctatcccaacaatacgctagtcagggtgtcattaagcctttggtggtggatgtggggaaagaacaaatcggtatcacggatagcatgctcttggtggctcaaaacatcgttttagctttagggcaagtggatttgagcaaaatccaacaaaacaataacgaacagctatacgaaaatattatgaaagtcatgcttttaggcgcgggcgggactaatggggcgtataatggcgtgagtgtgggcgacattgccacgggcatgcaaaatttttcttcgcaaacgggcttgataggggctaattctacggttagcgagctgaatgctttgattaagagcgggatttctttggatcgtgagactttggggttagggagttttattgaaaaaaatatctgtagcggtgcatcgtcttgttttagtgggaatcagcttatctataagaaagggctagacagaaccataaacatcattaatacggtattaggtcagtttgaatcttcggctagttctctttataagatttcttatatccctaacctcttttcgctcaaggattaccagtcagcgagcatgaacggctttggggctaagatgggctataaacaatttttcacccataagaaaaatgttggcttaaggtattacgggtttttggattatggctatgcgaactttggcgatacgaatttaaaagtgggggcgaatcttgttacttatggggtaggaacggattttttatacaatgtgtatgaacgctctagaaggagggaaaggactacgatcggtcttttctttggcgctcaaattgcagggcaaacttggagcactaatgtaacgaacttattgagcgggcaaaggcctgatgtcaagtccagttcgttccaattcttgtttgatttgggcgtgcgcaccaactttgcaaaaaccaatttcaataagcacaggctagaccaagggatagaatttggggtgaaaatccctgttatcgctcataaatattttgcaacccaaggctcaagcgcgagctatatgaggaattttagcttctatgtgggctattcagtcggtttttaaggaaggctcttgatgaaaaataccaatacaaaagagataaagaatacaag

SEQ ID NO: 174 - protein, 470 aa, Helicobacter pylori
MSLCRAEEDGAFFVIDYQTSLARQELKNPGFTQAQELRQLIRDGAVRLQTSAIPLSYYLDILGNKTATLLRESLKNNAQPSQPNAQPPQQNGPSNQALANLEQSLGILGKLLDLSQQYASQGVIKPLVVDVGKEQIGITDSMLLVAQNIVLALGQVDLSKIQQNNNEQLYENIMKVMLLGAGGTNGAYNGVSVGDIATGMQNFSSQTGLIGANSTVSELNALIKSGISLDRETLGLGSFIEKNICSGASSCFSGNQLIYKKGLDRTINIINTVLGQFESSASSLYKISYIPNLFSLKDYQSASMNGFGAKMGYKQFFTHKKNVGLRYYGFLDYGYANFGDTNLKVGANLVTYGVGTDFLYNVYERSRRRERTTIGLFFGAQIAGQTWSTNVTNLLSGQRPDVKSSSFQFLFDLGVRTNFAKTNFNKHRLDQGIEFGVKIPVIAHKYFATQGSSASYMRNFSFYVGYSVGF

SEQ ID NO: 175 - DNA, 505 bp, Helicobacter pylori
  CDS (51)...(452)
aagaccctaaatacacacaaaataaaacaaaataaatccaatcaaatcccatgtgccaaatccaatgcttgcttattttactttctatcaatatagttagcgcgatcatcgtttattttttccaagcatttcaaggggttttgaattttgaagggggttttttagggttttttatcgtggcgttgtcttcgtattacggcgttaaaaagcgtttggatttaaggaaacaaaattcaatagaaaaagaagaaaagcaaaaattccaaaaattcgccctgggcttggaaatgtctttcaatgtgtggcgtttaggagggtatggggttttactaggcattttaggaacgcttttattcttgcatctttttaacgggttaatctttcttattggcgtgtttgtgagctcgctctctagcgcgttattacgatttttgaataataatggtaagttttgacacaaactcacatggattttaacccctttaatcctcttttaatttttaat

SEQ ID NO: 176 - protein, 134 aa, Helicobacter pylori
MCQIQCLLILLSINIVSAIIVYFFQAFQGVLNFEGGFLGFFIVALSSYYGVKKRLDLRKQNSIEKEEKQKFQKFALGLEMSFNVWRLGGYGVLLGILGTLLFLHLFNGLIFLIGVFVSSLSSALLRFLNNNGKF

SEQ ID NO: 177 - DNA, 511 bp, Helicobacter pylori
  CDS (51)...(458)
tttttgcactatcgttgtttgcgctgtggtgtttggcacgcttgaaaaaaatgctcaagagtaccatcaaagaagattatttgatgctgatgtctagagaagtgagtgcttttgtggggactcttttcttcattggcttgagttgctatgcgatctatcatggcaacatgcccgattatttgagaccggctttgatagacactattaaggcagcgagtgattccatctattccagctgcgactacatggattattttttgaaggctagaaagatgttagaggggtttgcttggtggagcatgttcaaagcggagagcatgggcttaaataaggggtttatggttgcgggctgggtagcgtttatcatctataacgctcttagcgggatagccatcagcaggctgagcgctcaaatcatttattggttatcaaaatattttaggagtgagtatggaaaatgatgttaaagaagatctagagcaagcaagaccaaagttagagccagaaaagc

SEQ ID NO: 178 - protein, 136 aa, Helicobacter pylori
MLKSTIKEDYLMLMSREVSAFVGTLFFIGLSCYAIYHGNMPDYLRPALIDTIKAASDSIYSSCDYMDYFLKARKMLEGFAWWSMFKAESMGLNKGFMVAGWVAFIIYNALSGIAISRLSAQIIYWLSKYFRSEYGK

SEQ ID NO: 179 - DNA, 2203 bp, Helicobacter pylori
  CDS (51)...(2150)
gagttacacactctttgagaacaaaacgccaaaccatttaggaaattaccatgctaagattcgttagtaaaacgatttgcttgtctttaatcggcttgttcaaccctttagaagcctttcaaaaacaccaaaaagacggcttttttatagaagctgggtttgaaactgggttattagaaggaacgcaaactaaagaagaagtcataaccacccaaaaaatctatgaaaaccccctaacccacccacaaactaaagaacagcctaaagaacaaaataaaagcgatacggccaccccacaaagcgcttacggaaaatactacataccccaaagcaccattttaaaaaatgcaacggctttattcaccacggacaagatagaaaatggcttaactttttattctcaaaaccctgtgtatgcgaatatggttaatgggagcgtaaccatacaaaactttctgccttataatttaaacaatgttgaactgagttttaaagacgctcaaggcaaggtggtcaatttaggcgtgatagagaccatccctaaacaatctcaaattaccttgcctgcaagcttgtttaatgattcagaatttgaacaagctgatagctttaattaccaacaacttcaagccactgccacacaattttctgacgctaacacgcaaagtttgtttcaaaagctcagcaagatcacaaccaatgtaacaatgagttatgaaaacgccgataccaacaattttaaaggtaattgccatgattgtgtgtcagatttcaccccacaaaccgcagaagaattgaccaatttaatgctagatatgattgcggtgtttgactctaaatcgtgggaagaagccgttttaaacgctcctttccaattttctaacagctcatcagagtgcggctctgactttcctaagtgcgtgaatcctttcaataacgggcgtgtcgctcccatctatgaaaaatacgtgctaaccccacaatccgttatagatgcgtttagaagaacgatcaatcttgaagtgaatatcctaaaatcagggtttgtagggctagggtatgaacttgatgataatgatggtaatctggggatagaagcttctgccttaaatcctgaaaaattgtttggtaaaactttgaacaaagttgatattgtggaattaagagacattatccatgaatttagccacactaaaggctatacgcataatgggaacatgacttatcaaagagtgcgcttgtgtcaagaaaacggcggagccatacaagaatgtgagggtgggaaagaagagttagtcaatggaaaagaagaactaaaatttacaaatgggaaagaagtgaaagatcaggatggttacacctatgatgtatgttctttttataaggacaaccaccaagtctatacagcgagcaattaccccaattccatttatacgaattgcgctcaagtccctgctgggcttataggggttaccaccgctgtctggcaacagctcatcaatcaaaacgctctgcccattaatttcgctaatctaaatagcccaaccaaccacttaaacgccgggttgaacgcacaaaattttgcaacctctatagtcagcgcgatcgcgcaaaatttttccaccacttccaccaccacttaccgctcttcaagtaagaattttagaagccctattttaggggttaatgttaaaataggctaccaacattatttcaatgactacatagggttagcctattacggcattatcaaatacaattacgccaaaactaacgatgaaaaaatccagcaattaagctatggtgggggaatggatgtgttgtttgatttcatcaccacttacgctaacaaaaagcaagacaacccaactaaaaaagtttttgcttcctcttttggggtgtttggggggttaaggggcttatacaatagctattatgtcttcaaccaagtcaaaggaagcggtaatttagatatagttactgggtttaattaccgctacaagcattctaaatattctgtaggcattagcgttcctttaatccaaagcggtattaaaatcgcttctaataatggcatctatgcgaactccgttgttttgaatgaagggggcagtcattttaaagtgttttttaattacgggtggattttttaggatttaaaatccccaataaccccctaaacttgtgcgatactcgctacaaa

SEQ ID NO: 180 - protein, 700 aa, Helicobacter pylori
MLRFVSKTICLSLIGLFNPLEAFQKHQKDGFFIEAGFETGLLEGTQTKEEVITTQKIYENPLTHPQTKEQPKEQNKSDTATPQSAYGKYYIPQSTILKNATALFTTDKIENGLTFYSQNPVYANMVNGSVTIQNFLPYNLNNVELSFKDAQGKVVNLGVIETIPKQSQITLPASLFNDSEFEQADSFNYQQLQATATQFSDANTQSLFQKLSKITTNVTMSYENADTNNFKGNCHDCVSDFTPQTAEELTNLMLDMIAVFDSKSWEEAVLNAPFQFSNSSSECGSDFPKCVNPFNNGRVAPIYEKYVLTPQSVIDAFRRTINLEVNILKSGFVGLGYELDDNDGNLGIEASALNPEKLFGKTLNKVDIVELRDIIHEFSHTKGYTHNGNMTYQRVRLCQENGGAIQECEGGKEELVNGKEELKFTNGKEVKDQDGYTYDVCSFYKDNHQVYTASNYPNSIYTNCAQVPAGLIGVTTAVWQQLINQNALPINFANLNSPTNHLNAGLNAQNFATSIVSAIAQNFSTTSTTTYRSSSKNFRSPILGVNVKIGYQHYFNDYIGLAYYGIIKYNYAKTNDEKIQQLSYGGGMDVLFDFITTYANKKQDNPTKKVFASSFGVFGGLRGLYNSYYVFNQVKGSGNLDIVTGFNYRYKHSKYSVGISVPLIQSGIKIASNNGIYANSVVLNEGGSHFKVFFNYGWIF

SEQ ID NO: 181 - DNA, 397 bp, Helicobacter pylori
  CDS (51)...(344)
tcgttttggaaaaagatatagcccatgcgcgtttcaagggtaatgaaagcatggtgtatgaagaaaattttgtgcatgccgggtttgtgcttattgcgtgcaattatgcggccttgtgcgcgttgaataaaagacacagcgtggtggtttctaataacatcaatttttatgcccccctagaattgaatcaagaagcactcattaaagcgcaagtgattcaagatggcgtgaaaaaagctgaaataaaaatagaggcgtttgtgttagacattcaggttttagagggaatgatagaaattgtggtgtttgataaaaagccttttaaattcaattttaaagaagagtagttaaatggttattgttttagtcgtggatagttttaaagacaccagtaatg

SEQ ID NO: 182 - protein, 98 aa, Helicobacter pylori
MVYEENFVHAGFVLIACNYAALCALNKRHSVVVSNNINFYAPLELNQEALIKAQVIQDGVKKAEIKIEAFVLDIQVLEGMIEIVVFDKKPFKFNFKEE

SEQ ID NO: 183 - DNA, 1261 bp, Helicobacter pylori
  CDS (51)...(1208)
atgatagtaaggaaataagagtggaatgcaagaatcaccctattgaaaagatggcagaaaaattagaggaaactaatcctgaatggtttgaaaaatggagggaaaaacaatacacccaaactggcgaatctaagccatcaaaacgaatcaaagtttttaaaaactttacggcatttgatgacagattgtatacaattgaatgtaatttaaaaaatctggatacccatcaaaaaaagtttgaaatttgtggggctctgtatgacatttatgaacaaatttttgatgaaacaccaagcttgaaagggcgcgatttagaaacatacaaagcacaagatttgtcaaagaaattcatgcatttaggttttgaacagatctcaaaagatttaaacgactctagattgaacgctttattgtgctatgaggaaaaagtcatgcaagctttggctaaaaaataccctagttttttacaagatttgcatgatataaaaaaatacaggaataaagataaacacggcgagaaaccacaagatgggtcttctttaacgagagtggaattagaaagatacagagatggaatttattttctagtagaaaatcttttaaaaaaccccttgattaaagagagagaaaatgctcaagaagaaaaacattataagaaaaatgcagagattgacgaccgatcccagctatcaaacttaaacgcacccaaacccttatttgaatgttttgtaggagttaatctggccaaagccaaatattattctaaaaaagaagaaagagaaaaagaaaagatgatcttgaatttttgtaagatatttgaaattattctttttgaagctatccaaaaacaaccaaagcctgattttaaaaataaagacgagcttttaggggattatcctaatcttaaaaatttagattctttaagagaagtgagggaagactttttgaaaagagcgtttaagaatgatgaagcgagtttgggagcgtatgtgttagtgttgcttagctgtaagtattttgagagcgtgtttgaaaaagttcaagaatggctagattttatcgctaggcttattgctttgagaggccatgtgcacaagataactaaagaacttgaaagattagaagaagaggatttagaaaaattggaaaaacaagcactagaatattttaataaaatagcaaataaaatatatctaaaggagaaacgatgagcgggaatgaagaattggagctaagagccagagaaactgagttggataaa

SEQ ID NO: 184 - protein, 386 aa, Helicobacter pylori
MAEKLEETNPEWFEKWREKQYTQTGESKPSKRIKVFKNFTAFDDRLYTIECNLKNLDTHQKKFEICGALYDIYEQIFDETPSLKGRDLETYKAQDLSKKFMHLGFEQISKDLNDSRLNALLCYEEKVMQALAKKYPSFLQDLHDIKKYRNKDKHGEKPQDGSSLTRVELERYRDGIYFLVENLLKNPLIKERENAQEEKHYKKNAEIDDRSQLSNLNAPKPLFECFVGVNLAKAKYYSKKEEREKEKMILNFCKIFEIILFEAIQKQPKPDFKNKDELLGDYPNLKNLDSLREVREDFLKRAFKNDEASLGAYVLVLLSCKYFESVFEKVQEWLDFIARLIALRGHVHKITKELERLEEEDLEKLEKQALEYFNKIANKIYLKEKR

SEQ ID NO: 185 - DNA, 412 bp, Helicobacter pylori
  CDS (51)...(359)
catttaatgctaagtctaataagattgccctagatagacattacgccaaaatgtttttgcaagttgtagcaagaactctaagaaagaatgtcaatatattagaagagcaaggttttattgaagtcattaaaggaaaacaaagatacttgtatgtgtatcttaaagattacagagaattagagggctataactccgtaggagctaatcaaaagaacaatatcccatcgccttttttcttacagattatgcgtttcttagaaaagtttgccaaagaaattgagagagtaaaaataacaacaaagaatgtgttatgcatattcctagccaagagcttatgcaaagagttaataatgttgttttaaaattcacgcctatttctaatcctaataccacttacactttatcctacaag

SEQ ID NO: 186 - protein, 103 aa, Helicobacter pylori
MFLQVVARTLRKNVNILEEQGFIEVIKGKQRYLYVYLKDYRELEGYNSVGANQKNNIPSPFFLQIMRFLEKFAKEIERVKITTKNVLCIFLAKSLCKELIMLF

SEQ ID NO: 187 - DNA, 1204 bp, Helicobacter pylori
  CDS (51)...(1151)
ttctattaaaattagtgtatgattgagattatttttgattaggatcaaccatgcaaaaagccttattacattcatcattctttttacctttatttttatctttttgtatcgctgaagaaaatggggcgtatgcgagcgtgggttttgaatattccattagtcatgccgttgaacacaataacccctttttaaatcaagaacgcatccaaatcatttctaacgctcaaaataaaatctataaactccatcaagttaaaaatgaaatcacaagcatgcctaaaacctttgcatatatcaacaacgctttaaaaaacaactccaaattaacccccactgaaatgcaagccgaacaatactacctccaatccacctttcaaaacattgaaaaaatagtaatgcttagcggtggcgtttcatctaacccacaattagtccaagcgttggaaaaaatgcaagaacccattactaaccctttagaatttgaagaaaacttaagaaatttagaagtgcaatttgctcaatctcaaaaccgcatgctttcttctttatcttctcaaatcgctgccatttcaaattccttaaacgcgcttgatcctaactcttattctaaaaacatttcaagcatgtatggggtgagtttgagcgtaggttataagcatttctttaccaagaaaaaaaatcaagggttgcgctattacttgttttatgactatggttacactaattttggttttgtgggcaatggctttgatggtttaggcaaaatgaataaccatctctatgggcttgggatagactatctttataatttcattgataatgcaaaaaaacactctagcgtaggtttttatctgggttttgctttagcggggagttcgtgggtagggagtggtttgagcatgtgggtgagccaaacggattttatcaacaattacttgacgggctatcaagctaaaatgcacacgagttttttccagatccctttgaattttggggttcgtgtgaatgtcaataggcataatggctttgaaatgggcttgaaaatccctttagcgatgaattccttttatgaaacgcatggcaaagggctaaacacttccctctttttcaaacgccttgtcatgtttaacgtgagttacgtttatagtttttaggggggtaaatgccttcaaacgctcttttgattgaagaaatcactcattta

SEQ ID NO: 188 - protein, 367 aa, Helicobacter pylori
MQKALLHSSFFLPLFLSFCIAEENGAYASVGFEYSISHAVEHNNPFLNQERIQIISNAQNKIYKLHQVKNEITSMPKTFAYINNALKNNSKLTPTEMQAEQYYLQSTFQNIEKIVMLSGGVSSNPQLVQALEKMQEPITNPLEFEENLRNLEVQFAQSQNRMLSSLSSQIAAISNSLNALDPNSYSKNISSMYGVSLSVGYKHFFTKKKNQGLRYYLFYDYGYTNFGFVGNGFDGLGKMNNHLYGLGIDYLYNFIDNAKKHSSVGFYLGFALAGSSWVGSGLSMWVSQTDFINNYLTGYQAKMHTSFFQIPLNFGVRVNVNRHNGFEMGLKIPLAMNSFYETHGKGLNTSLFFKRLVMFNVSYVYSF

SEQ ID NO: 189 - DNA, 1687 bp, Helicobacter pylori
  CDS (51)...(1634)
ttatttttacagagtaatttatctattctcaggtaaagtaaggaagaggaatgaaattaaagaaacgaaaagttgcggctgcattgctaaagcgttttaccttgccactattgttcactacgggttcattaggggcggttacttatgaagtgcatggagattttatcaattttgctaaagtgggttttaaccattcgcccattaatcctgttaaaggtatctatcccacagaaacttttgttaaccttacgggtaagctagaggggtctgtgcatttaggtaggggatggaccgtgaatttaggcggtgttttgggcggacaggcttatgatggcactaagtatgataggtgggcgaaggattttacccccccaagctattgggataaaacttcttgcggtactgattctatgagtctttgtatgaatgccactaaaatgtggcagcaatcagggccaggtggcgtcattaaccctagaggtattggttgggaatacatgggtgagtggaacggcttgttccctaactactatccggctaacgcctacttgcctggtggctcaaggcgctatcaagtctataaagcaaatttgacctatgatagcgacagggtccatatggtaatggggcgttttgacattaccgagcaggagcaaatggattggatttaccaattgttccaagggttttatgggactttcaagctcactaagaatatgaaattcttgctctttagtggttggggtcgtggtatcgctgatggtcagtggttgttccctatctatcgtgaaaagccttggggggttcataaagcgggtattatttatcgccctacaaagaatttgatgatccacccttatgtgtatcttatcccaatggtaggcacattgcctggtgctaaaatagaatacgataccaatcctgaatttagcggtaggggcattaggaacagaacgactttctatgcgttgtatgactatcgttggaataacgctgaatacggtcgttacgcgcccgctcgttataacacttgggatccgttcttggataatggtaagtggcgtggcttgcaaggtcctggtggtgcgacgctccttttacgccaccatatagatattaacaactactttgtggttggtggtgcttatctcaacattggtaaccctaacatgaacttaggtacttggggtaaccctgtggctgttgatggtatcgaacaatgggtcggtagtatctatagcttagggtttgcggggattgacaacattaccgatgctgacgcgttcaccgagtatgttaaaggtggaggcaagcatggtaagtttagttggagcgtttatcagcgcttcactaccgctccaagggctttggaatatggtatcggtatgtatctagactatcagttcagcaagcatgttaaagcgggtctcaaactcgtatggttagagttccaaattcgtgcgggttacaaccctggaaccggtttccttgggccaaacggtcagccgcttaacttgaatactggtttgtttgagtcttcagcgttcgctcaaggccctcaaaacatgggcggtatcgcaaaaagcatcactcaagacagaagccatttgatgacacacattagttatagtttctaagagagttctccccctatctcttagatatgcctttttgtatttttatttta

SEQ ID NO: 190 - protein, 528 aa, Helicobacter pylori
MKLKKRKVAAALLKRFTLPLLFTTGSLGAVTYEVHGDFINFAKVGFNHSPINPVKGIYPTETFVNLTGKLEGSVHLGRGWTVNLGGVLGGQAYDGTKYDRWAKDFTPPSYWDKTSCGTDSMSLCMNATKMWQQSGPGGVINPRGIGWEYMGEWNGLFPNYYPANAYLPGGSRRYQVYKANLTYDSDRVHMVMGRFDITEQEQMDWIYQLFQGFYGTFKLTKNMKFLLFSGWGRGIADGQWLFPIYREKPWGVHKAGIIYRPTKNLMIHPYVYLIPMVGTLPGAKIEYDTNPEFSGRGIRNRTTFYALYDYRWNNAEYGRYAPARYNTWDPFLDNGKWRGLQGPGGATLLLRHHIDINNYFVVGGAYLNIGNPNMNLGTWGNPVAVDGIEQWVGSIYSLGFAGIDNITDADAFTEYVKGGGKHGKFSWSVYQRFTTAPRALEYGIGMYLDYQFSKHVKAGLKLVWLEFQIRAGYNPGTGFLGPNGQPLNLNTGLFESSAFAQGPQNMGGIAKSITQDRSHLMTHISYSF

SEQ ID NO: 191 - DNA, 412 bp, Helicobacter pylori
  CDS (51)...(359)
ttttgtctgatttgttgctaccaaaaccattaccaaccaaagcagatcccatgtttttgatactatcgaatccattcttcaacacttctgccataaaattcttgatattgtccataggcaagttgaattttttccctaatatttcattaagtcccatcattaacatcaggaagaacaaaaaatttaatatcatagaaaacaaatcactggataaacctgtaaaaagatttgttccgccacccaacaaagaagctaaaatttttcccatgatcagtccttttatttttggttgtgtaagttcttgcttgttcggatctctaatgcgtgttttagtaggaagcatttcacaatggcatacctaaagctactaagaaaattcttgaatctattggtaagattactcatgaaatca

SEQ ID NO: 192 - protein, 103 aa, Helicobacter pylori
MFLILSNPFFNTSAIKFLILSIGKLNFFPNISLSPIINIRKNKKFNIIENKSLDKPVKRFVPPPNKEAKIFPMISPFIFGCVSSCLFGSLMRVLVGSISQWHT

SEQ ID NO: 193 - DNA, 447 bp, Helicobacter pylori
  CDS (67)...(405)
tccaatccgtctaatatctctttattttcgctcaattctttaaccataacgggttttttagcgcttgtgggggttactgggctaaagtttggagcgttttgcacttctttttcttctttttttagattttcctttatcatttcttctatccttccttctatcatttcttcttgcgtgttttcttgtgggttttcttcttttttagggtggttgggggttttttggttttctgttttgttgtcattttctattatgggtgcaagtgtgggcatgataggtttgggcgtggtgggcgtaagagtttcttttgtaggcgtgggttctctttctttagtttcttgtttaatttcttttaaaggggggttagtggggttagtcaaatcatcaaatcggtttcttttagggtaaatggtgtaatgggtaggggggtgggaggaaatttggact

SEQ ID NO: 194 - protein, 113 aa, Helicobacter pylori
VGVTGLKFGAFCTSFSSFFRFSFIISSILPSIISSCVFSCGFSSFLGWLGVFWFSVLLSFSIMGASVGMIGLGVVGVRVSFVGVGSLSLVSCLISFKGGLVGLVKSSNRFLLG

SEQ ID NO: 195 - DNA, 1180 bp, Helicobacter pylori
  CDS (51)...(1127)
ccaagaaagagtataatagcgcataagaatttaactgatgaagaggtttaatgctagaaaatagagttaagaccaagcaaatttttatcggtggcgtggccatagggggtgatgctcccataagcacgcaaagcatgacctttagcaaaaccgctgatattgaaagcactaaaaatcaaattgacagactcaaactcgccggggccgatttagtgagggtggcggtgagtaatgaaaaggacgctctagccttaaaagaattgaaaaaagtgtcccctttgcctttaatcgctgatattcatttccattataaattcgctctcattgccgctcaaagcgtggatgcgatcaggattaaccccggaaacatcggctctaaagagaagatcaaagcggtggttgatgcttgtaaagaaaaaaacattcctataagaattggcgtgaatgctgggagtttagaaaagcagtttgatcaaaaatacggacccaccccaaaaggcatggtagaaagcgctttgtataacgccaaacttttagaagatttggattttaccaattttaagatttctttaaaagcgagcgatgtgattcgcaccatagaagcttacaggatgcttcgccctcttgtgatctatcctttccatttgggggttacggaggcggggaatctttttagctccagtatcaaatccgctatggctttaggggggcttttaatggagggcattggggatacgatgcgcgtatccatcacaggggaattagaaaatgaaatcaaagtggccagagcaattttacgccatagcgggcggttgaaagaagggattaattggatttcttgccccacttgcgggcgcattgaagccaatttagtggatatggcgatcaaggtagaaaaacgcttaagccacatcaaaacccctttagacattagcgtgatgggttgcgtggtgaatgctttgggtgaagccaagcatgcagacatggcgatcgcttttgggaatcgcagcggtttgatcattaaagagggtaaagtcattcacaaactggctgaaaaggatttatttgaaacttttgtgatagaagtggaaaatttagctaaagaaagagaaaaaagtttaaaggattaggcatgatcaataagtttaaaaattttgtgagcaactaccagcaatctaac

SEQ ID NO: 196 - protein, 359 aa, Helicobacter pylori
MLENRVKTKQIFIGGVAIGGDAPISTQSMTFSKTADIESTKNQIDRLKLAGADLVRVAVSNEKDALALKELKKVSPLPLIADIHFHYKFALIAAQSVDAIRINPGNIGSKEKIKAVVDACKEKNIPIRIGVNAGSLEKQFDQKYGPTPKGMVESALYNAKLLEDLDFTNFKISLKASDVIRTIEAYRMLRPLVIYPFHLGVTEAGNLFSSSIKSAMALGGLLMEGIGDTMRVSITGELENEIKVARAILRHSGRLKEGINWISCPTCGRIEANLVDMAIKVEKRLSHIKTPLDISVMGCVVNALGEAKHADMAIAFGNRSGLIIKEGKVIHKLAEKDLFETFVIEVENLAKEREKSLKD

SEQ ID NO: 197 - DNA, 1399 bp, Helicobacter pylori
  CDS (51)...(1346)
gcctatgaaatcttaaagcgttatccggctaaagcaaaggtataaataacatgaaaaaatttttaatcactttattattaggagtttttatggggttacaagcgagcgctttgacacaccaagaaatcaatcaagctaaagtccctgtgatttatgaagaaaaccatttgttgcctatggggtttatccatttagcctttagggggggtgggagcttaagcgataaaaaccagttgggtttggcgaaattattcgcgcaagttttaaacgaaggcactaaagagcttggtgcggtggggtttgcgcaacttttagagcaaaaagcgatcagtttgaatgtggataccagcacagaagatttgcaaatcactttagaatttttaaaagaatacgaagatgaagccattacgcgcttaaaagagcttttaaaatcccctaatttcacgcaaaacgctttagaaaaagtcaaaacccaaatgttagccgcacttttacaaaaagaaagcgattttgactatttggctaaattgactttaaagcaagagctttttgctaacacccctttagctaacgcagccttaggcactaaagagagcattcaaaaaatcaagctagacgatttgaaacagcaatttgctaaggtctttgaactcaataagctcgtggtggtgcttgggggcgatttgaaaatcgatcaaacccttaagcgtttgaataacgcccttaatttcttgccacaaggtaaagcgtatgaagagccttattttgaaacgagcgataaaaaaagcgaaaaagtcctctataaagacactgagcaggctttcgtgtattttggtgcgccctttaaaatcaaggatttaaaacaggatttagcgaaatctaaagtcatgatgtttgtgcttggtggggggtttggctctcgtttaatggaaaaaatcagggttcaagagggattagcttatagcgtgtatatccgctccaatttttctaaagtggcgcattttgcgagcgggtatttgcaaaccaagctcagcactcaaactaaaagcgttgccttagttaaaaaaatcgttaaggaatttatagaaaaaggcatgacgcaacaagaattagacgacgctaaaaagtttttactaggctctgagcctttaaggaatgaaacgatctctagccgcttgaacaccacttacaattatttttatttaggtttgcctttaaattttaaccaaacgctgctcaatcaaatccaaaaaatgagtttgaaagaaatcaatgatttcattaaagcccacaccgaaatcaacgacttgacttttgctattgtgagcaataaaaagaaggacaaatgatgccatttgaagctgtaatcgggctagaagtccatgtccaactcaacacc

SEQ ID NO: 198 - protein, 432 aa, Helicobacter pylori
MKKFLITLLLGVFMGLQASALTHQEINQAKVPVIYEENHLLPMGFIHLAFRGGGSLSDKNQLGLAKLFAQVLNEGTKELGAVGFAQLLEQKAISLNVDTSTEDLQITLEFLKEYEDEAITRLKELLKSPNFTQNALEKVKTQMLAALLQKESDFDYLAKLTLKQELFANTPLANAALGTKESIQKIKLDDLKQQFAKVFELNKLVVVLGGDLKIDQTLKRLNNALNFLPQGKAYEEPYFETSDKKSEKVLYKDTEQAFVYFGAPFKIKDLKQDLAKSKVMMFVLGGGFGSRLMEKIRVQEGLAYSVYIRSNFSKVAHFASGYLQTKLSTQTKSVALVKKIVKEFIEKGMTQQELDDAKKFLLGSEPLRNETISSRLNTTYNYFYLGLPLNFNQTLLNQIQKMSLKEINDFIKAHTEINDLTFAIVSNKKKDK

SEQ ID NO: 199 - DNA, 574 bp, Helicobacter pylori
  CDS (51)...(521)
gaagagccagaaaatttagaaacctcttcggcacaaaatttgtttgagtgatgcgtttcttttcattcttttattttttattttattttttaggggtttctttgcaagctctcagccccctagaagatcaagaatttttaatttcgtaccgcttgaaaatcgttgattctagagtgatgggcgaagagtattctgtctctaaacctatcgttagccgcattaaaacagccccctatgttttagactatcattgctccatcatcactcgtaacttacccaatttgaaaaaccccttgctcccaataaagttagaacgcttccttttagaaatcgcgttaaaaaaagaaaaagagcgggtcatagactgcattttaaaaagccaggtcgctatcacgcattatgatcatagctataaaaacggcaccactaccacaagcattcttgccctcaaagccttaagcgttagagcgagtttagtgggagatgcgctgtttttagatatttttagaaaggaagaagaatgaaaatcgccattgtagaagatgatattaacatgcgtaaaagcctggagctt

SEQ ID NO: 200 - protein, 157 aa, Helicobacter pylori
MRFFSFFYFLFYFLGVSLQALSPLEDQEFLISYRLKIVDSRVMGEEYSVSKPIVSRIKTAPYVLDYHCSIITRNLPNLKNPLLPIKLERFLLEIALKKEKERVIDCILKSQVAITHYDHSYKNGTTTTSILALKALSVRASLVGDALFLDIFRKEEE

SEQ ID NO: 201 - DNA, 1003 bp, Helicobacter pylori
  CDS (51)...(950)
atcatgagaaaacgcttcactccacttttgttattcaggaaataatacagatgagaaaaacgatttcagcgttgtttttatcagcgtgcatagggttatcgtctgtttatgcagataacgctttgattttgcaaaccgattttagtctaaaagatggggccgtctcggcgatgaaaggcgtcgctttcagcgttgattcccatcttaaaatctttgatttaacgcacgaaatccccccgtataacatctgggaaggcgcttaccgcttgtatcagaccgccagttattggccaaaaggttcggtatttgtgagcgtagttgatccgggcgtaggcactaagcgtaaatcggtggtactaaaaactaaaaacggccagtatttcgtctcgccggataacggcacgctgactttggtggcacaaactttggggattgatagcgtgcgtgaaattgatgaaaaagctaaccgcttgaaaggttctgaaaaatcctatactttccatggtcgtgatgtgtatgcttacaccggtgcacgcttggcttctggggcgatcacattcgagcaggtcgggccagagcttcccccaaaagtcgttgaaattccttaccaaaaagcgaaagccacaaaaggggaagtgaaaggtaatatcccgattttggatattcaatatggcaatgtttggagcaacatcagcgataaattactcaatcaagcaaaaatcaaactcaatgacacgctgtgtgtaacgatttttaaaggttctaagaaacaatacgaagggaaaatgccgtatgtcgcaagctttggcgatgtgccagaaggccagccgttagtttatttaaacagcttgttaaatgtttccgtggcgctgaatagggataatttcgcgcaaaaatatcaaatcaaatccggtgctgactggaatattgatataaagaagtgcgctaagtaaagcgctgtttagaaaattaaggggcgtgaaacgccctaaccgctaaagat

SEQ ID NO: 202 - protein, 300 aa, Helicobacter pylori
MRKTISALFLSACIGLSSVYADNALILQTDFSLKDGAVSAMKGVAFSVDSHLKIFDLTHEIPPYNIWEGAYRLYQTASYWPKGSVFVSVVDPGVGTKRKSVVLKTKNGQYFVSPDNGTLTLVAQTLGIDSVREIDEKANRLKGSEKSYTFHGRDVYAYTGARLASGAITFEQVGPELPPKVVEIPYQKAKATKGEVKGNIPILDIQYGNVWSNISDKLLNQAKIKLNDTLCVTIFKGSKKQYEGKMPYVASFGDVPEGQPLVYLNSLLNVSVALNRDNFAQKYQIKSGADWNIDIKKCAK

SEQ ID NO: 203 - DNA, 1213 bp, Helicobacter pylori
  CDS (51)...(1160)
  misc_feature 62: n = A,T,C or G
attatttttaatcttgcatgaaatcttaaatatagaattagtccctttggatgggattttcnctcgcgctaggctatttgtgtttgtttatattcgttttaagcgcttctttaatctctgaaaaagccttatccaagcagtatttgcaaaccgctaaagataaaatcacctctttaaagaatttaaaagtcatcgccattaccggaagctttgggaaaaccagcaccaaaaatttcttgcttcaaatcttacaaaccacattcaacgcgcatgcaagccccaaaagcgtcaatacccttttagggcttgcgaatgatattaatcagaatttagacgataggagtgaaatctatatcgctgaagccggggcaaggaataagggcgatattaaagaaatcacctgtctcattgaaccgcaccttgttgtggttgcagaagtgggcgaacagcatttagaatactttaaaactttagaaaatatttgcgagactaaagcggaattattggattccaaacgcttagaaaaagccttttgttactcggtggaaaagatcaagccctatgcccctaaagatagccctttaatagactattctagcctggttaaaaacatccaatccactttaaaaggcacttcttttgaaatgcttataggtagcgtttgggaaagatttgaaacaaaggttctaggggagtttagcgcttataatatcgcttcagccattttaatcgctaagcatttaggcttagagaccgaaaggatcaaacggcttgttttagaactcaaccctattgctcatcgtttgcaacttttggaagtgaatcaaaaaatcatcatagacgatagctttaatgggaatttaaagggcatgttagagggcattcgtttagcgagtttgcacaaagggcgtaaagtcattgtaacaccgggcttagtggaaagcaatacagaaagtaatgaggctttagcgcaaaaaatagacggggtttttgatgtcgctatcatcacaggggagttgaattccaaaacgattgcttcacaattgaaaaccccccaaaaaatcttactcaaggataaggcgcaattggaaaatatcttacaagccaccacgattcaaggcgatttgattttattcgctaatgacgcccctaattacatttaggaaatgaacatgcaacatttatacgctccttggcgcgaaagttatttgaa

SEQ ID NO: 204 - protein, 370 aa, Helicobacter pylori
  VARIANT 4: Xaa = Any Amino Acid
MGFXLALGYLCLFIFVLSASLISEKALSKQYLQTAKDKITSLKNLKVIAITGSFGKTSTKNFLLQILQTTFNAHASPKSVNTLLGLANDINQNLDDRSEIYIAEAGARNKGDIKEITCLIEPHLVVVAEVGEQHLEYFKTLENICETKAELLDSKRLEKAFCYSVEKIKPYAPKDSPLIDYSSLVKNIQSTLKGTSFEMLIGSVWERFETKVLGEFSAYNIASAILIAKHLGLETERIKRLVLELNPIAHRLQLLEVNQKIIIDDSFNGNLKGMLEGIRLASLHKGRKVIVTPGLVESNTESNEALAQKIDGVFDVAIITGELNSKTIASQLKTPQKILLKDKAQLENILQATTIQGDLILFANDAPNYI

SEQ ID NO: 205 - DNA, 1303 bp, Helicobacter pylori
  CDS (51)...(1250)
ccttgtggtctcatttgtttctgttttacttgtagcttggaggactaggcatgtataaattaggggtgtttttgttagccaccttactatcagctaacacgcaaaaagtgagcgatattgctaaagatatccaacataaagaaacccttttgaaaaaaacccatgaagaaaaaaaccaactaaacagccgtttgagttctttaggcgaagcgatccgctctaaagagcttcaaaaggctgagatggagcgccaaatgatcgctttaaaaaagagtcttgaaaaaaatcgtaacgaaagtttggcgcaagaaaaagtcctaaccaactaccgcaagtctttagatcatttgcaaaaaaagcgatcatttttacaaaagagggtgtttgatacgcttttacaggatttccttttttcacaagccctaaaggggcagaatttagcctcttctaatgatgttgttttgcaagtggcgtttgaaaacttgcaccaaagcactctgtctaaaatgtcgcaactgagccaagaagaaaaggaactcaatacgcaagctttaaaagtcaaaaacagcattcaaaaaatctcatccatcatagatgagcaaaaaactcgtgaagtaaccttaaaatccttgaaaaccgaacaagataagctcattttgagcatgcaaaaagattatgcgatctacaaccaacgcctaacccttttagaaaaagagcgccagaatttaaacgctcttttaaaacgcttgaatatcatcaaacaaaacagagaaaatgaagaaaaagtcagtttgaaaaaatcttctcaagccttagaagtcaaacaagtggctagctcttatcaaaatatcaacaccacgagctataacggaccaaaaacgatcgctcccttgaacgattatgaagtggtgcaaaaatttggcccctatattgacccggtttataatttaaaaatttttagcgagtctattacgctcgtgtcaaaaaccccaaacgctttggtgcgtaatgttttagacgggaaaatcgtgttcgctaaagaaatcaacatgcttaaaaaagtcgttatcattgagcataaaaatgggatccgcacgatttattctcaattggataaaatcgctcccaccattaaaagcggcatgcggatccaaaaaggctatgttttagggcgcattgatcaacgcttgggctttgaagttaccatgagagaaaaacacatcaaccccttagaactcatcgcacgcaattaaacaaatcgtttttattgccgatattggctaaagaatttatgcaaacaaat

SEQ ID NO: 206 - protein, 400 aa, Helicobacter pylori
MYKLGVFLLATLLSANTQKVSDIAKDIQHKETLLKKTHEEKNQLNSRLSSLGEAIRSKELQKAEMERQMIALKKSLEKNRNESLAQEKVLTNYRKSLDHLQKKRSFLQKRVFDTLLQDFLFSQALKGQNLASSNDVVLQVAFENLHQSTLSKMSQLSQEEKELNTQALKVKNSIQKISSIIDEQKTREVTLKSLKTEQDKLILSMQKDYAIYNQRLTLLEKERQNLNALLKRLNIIKQNRENEEKVSLKKSSQALEVKQVASSYQNINTTSYNGPKTIAPLNDYEVVQKFGPYIDPVYNLKIFSESITLVSKTPNALVRNVLDGKIVFAKEINMLKKVVIIEHKNGIRTIYSQLDKIAPTIKSGMRIQKGYVLGRIDQRLGFEVTMREKHINPLELIARN

SEQ ID NO: 207 - DNA, 361 bp, Helicobacter pylori
  CDS (51)...(308)
aggatttaagattgcgtttgaagttagctagcgtatgcttgggcgttttgatgagtggttgtgcgtcttcttcgccaactggcactcttatcactatggtaacgatgccagtttctgggaatgatgcacaatactccaaagaagggcgtgcgagttgttggagtgtttttagtcttgtggctgccggtaattgttcggtagaaaaagcggctaaaagtggcggtgttaccaagattaaaatggtgagccgtgagacaaacaactttttaggtattgttggcaaatacaccacgatcgttcaaggcgactagttttaatatttagagagcgtagttgaatcgtctttcgttccactctaggc

SEQ ID NO: 208 - protein, 86 aa, Helicobacter pylori
MSGCASSSPTGTLITMVTMPVSGNDAQYSKEGRASCWSVFSLVAAGNCSVEKAAKSGGVTKIKMVSRETNNFLGIVGKYTTIVQGD

SEQ ID NO: 209 - DNA, 1564 bp, Helicobacter pylori
  CDS (51)...(1511)
tttaaacctgaatttcatatttttgattttttaaagggattagagttcttatgattgaatggatgcaaaatcatagaaaatatttagtggttacaatatggataagcacgatcgcttttattgccgctgggatgataggctgggggcaatacagcttttctttagatagcgatagcgctgccaaagtgggacagattaagatttctcaagaagaattagcccaagaataccgccgccttaaagacgcatatgctgagtctatccctgattttaaagaactcaccaaagatcaaatcaaagccatgcatttagaaaaaagcgctttagattcgctcatcaatcaagccttattgagaaatctcgctttagatttagggcttggcgctacaaagcaagaagtggcgaaagagatcagaaaaacgagcgttttccaaaaagatggcgtttttgatgaagaattgtataaaaatatcttaaagcaaagccattaccgccccaaacattttgaagaaagcgttgaaaggcttttaatccttcaaaaaatcagcactctattccccaaaaccactacccctttggagcaatccagcctatcgctttgggcaaaattgcaagacaaattagacattcttatcctaaaccctagtgatgttaaaatctctcttaatgaagaagagatgaaaaaatattacgagtcccataaaaaggattttaaaaagcccacgagctttaaaacacgctctttatattttgacgctagtttggaaaaacctgatttgaaggagttggaggaatactaccataaaaacaaggtgtcttatttggacaaagaggggaaattgcaggattttaaaagcgttcaagagcaagtcaagcatgatttaagcatgcaaaaagcgaatgaaaaagccttaaggagctatatcgctctaaaaaaagcgaacgcgcaaaactacaccacacaagattttgaagagaacaactccccctatactgctgaaatcacgcaaaaactcaccgctctcaaaccccttgaaatcctaaagccagagccttttaaagatggttttattgtggtgcaactcatctctcaaattaaagacgaattgcaaaattttaatgaagctaaaagcgctcttaaaacccgcctaactcaagaaaaaacccttatggcgttgcaaactttagccaaagaaaagcttaaggattttaagggcaaaagcgtgggctatgtaagccctaattttggaggcactattagtgagcttaaccaagaagaaagtgctaagtttatcaacgctctttttaaccgccaggaaaaaaaggggtttatcgctattaataataaagtggtgctctatcaaatcacagaacaaaatttcaaccactcatttagtgcagaagaaagccagtatatgcagcgtttagtcaataacactaaaacggatttttttgataaagcgttgatagaagaattgaaaaaacgctataagatagtcaaatacattcaataaatgcaaggggaaatcatggaacataaagaaatcgttataggggttgatct

SEQ ID NO: 210 - protein, 487 aa, Helicobacter pylori
MIEWMQNHRKYLVVTIWISTIAFIAAGMIGWGQYSFSLDSDSAAKVGQIKISQEELAQEYRRLKDAYAESIPDFKELTKDQIKAMHLEKSALDSLINQALLRNLALDLGLGATKQEVAKEIRKTSVFQKDGVFDEELYKNILKQSHYRPKHFEESVERLLILQKISTLFPKTTTPLEQSSLSLWAKLQDKLDILILNPSDVKISLNEEEMKKYYESHKKDFKKPTSFKTRSLYFDASLEKPDLKELEEYYHKNKVSYLDKEGKLQDFKSVQEQVKHDLSMQKANEKALRSYIALKKANAQNYTTQDFEENNSPYTAEITQKLTALKPLEILKPEPFKDGFIVVQLISQIKDELQNFNEAKSALKTRLTQEKTLMALQTLAKEKLKDFKGKSVGYVSPNFGGTISELNQEESAKFINALFNRQEKKGFIAINNKVVLYQITEQNFNHSFSAEESQYMQRLVNNTKTDFFDKALIEELKKRYKIVKYIQ

SEQ ID NO: 211 - DNA, 1435 bp, Helicobacter pylori
  CDS (51)...(1382)
caaaaagatggatttttgagcgtcaaagaggctataggagcggatttaagatgaaacatttttctgttaaaagacttttagggcttagttctgtcttgttagtcactttaggagcgagcatgcacgcacaatcttacttacccaaacatgagagcgttaccttaaaaaacgggttgcaagtcgtgagcgtccccctagaaaataaaaccggggttatagaagtggatgtgctttataaagtcggctctagaaacgaaaccatgggaaagagcgggatcgctcacatgttagagcatttgaattttaaaagcaccaaaaaccttaaagccggcgaatttgataaaatcgttaagcgttttgggggcgtgagtaacgcttctacgagttttgatattacgcgctacttcattaaaaccagtcaggctaacttggataagtctttagaattgttcgctgaaaccatgggttcattgaatttaaaagaagatgagtttttgcctgagcgtcaagtggtcgctgaagaaaggcgatggcgcactgataattcccctatcggcatgctttatttccgcttttttaacaccgcttatgtctatcacccctaccattggacgcccattggttttatggatgatattcaaaattggactttaaaagacattaaaaaattccattcgctctattatcagcctaaaaacgctatcgttttggtggtaggcgatgtcaattcccaaaaggtttttgaattgagtaaaaagcattttgaatccttaaaaaaccttgatgaaaaagctatccccaccccttacatgaaagagcctaagcaagatggagccagaacggcagtcgtgcataaagatggggtccatttagaatgggtggcccttgggtataaagtgcctgctttcaagcataaagatcaagtcgccttagacgcactaagtaggcttttaggcgaaggcaaaagctcgtggttgcaaagcgaattagtggataaaaaacgcttggcttctcaagctttctcgcacaacatgcaattacaagatgaaagcgtgtttttattcattgcggggggtaatcctaatgtcaaagccgaagccttacaaaaagaaatcgtagcgcttttagaaaagctgaaaaaaggcgaaatcactcaagcggaattagacaagctcaaaatcaatcaaaaagctgactttatttctaatttagaaagttctagcgatgttgcggggctttttgcggactatttagtgcaaaacgatattcaaggcttgacggattaccagcgacaatttttggatttaaaagtgagcgatttggtgcgtgtggccaatgaatattttaaagacacccaatcaaccaccgtgtttttgaaaccttaaaagagccttataacatgcaatttcattcatctagcgcgttgattacgcct

SEQ ID NO: 212 - protein, 444 aa, Helicobacter pylori
MKHFSVKRLLGLSSVLLVTLGASMHAQSYLPKHESVTLKNGLQVVSVPLENKTGVIEVDVLYKVGSRNETMGKSGIAHMLEHLNFKSTKNLKAGEFDKIVKRFGGVSNASTSFDITRYFIKTSQANLDKSLELFAETMGSLNLKEDEFLPERQVVAEERRWRTDNSPIGMLYFRFFNTAYVYHPYHWTPIGFMDDIQNWTLKDIKKFHSLYYQPKNAIVLVVGDVNSQKVFELSKKHFESLKNLDEKAIPTPYMKEPKQDGARTAVVHKDGVHLEWVALGYKVPAFKHKDQVALDALSRLLGEGKSSWLQSELVDKKRLASQAFSHNMQLQDESVFLFIAGGNPNVKAEALQKEIVALLEKLKKGEITQAELDKLKINQKADFISNLESSSDVAGLFADYLVQNDIQGLTDYQRQFLDLKVSDLVRVANEYFKDTQSTTVFLKP

SEQ ID NO: 213 - DNA, 250 bp, Helicobacter pylori
  CDS (51)...(197)
atataatcttttcttaattttgaagtttagcaaattttaaggaagtaaccatgatgaaaaaaaccctttttatctctttggctttagcgttaagcttgaatgcgggcaatatccaaatccagagcatgcccaaagttaaagagcgagtgagtgtcccctctaaagacgatacggatctattcttaccacgattctattaaggactctattaaggcggtggtgaatatctccactgaaaagaagattaaaa

SEQ ID NO: 214 - protein, 49 aa, Helicobacter pylori
MMKKTLFISLALALSLNAGNIQIQSMPKVKERVSVPSKDDTDLFLPRFY

SEQ ID NO: 215 - DNA, 328 bp, Helicobacter pylori
  CDS (51)...(275)
ttaagattgcggttatactgaaaaaaacaatatgaaatcaaggagcttgtatgcaacagcgtcatttaggccctttaaaagtgggtgcattagctctagggtgcatgggcatgacttatgggtatggggaagtccatgataaaaagcagatggttaaacttatccataaggctttggaattgggtattaacttttttgacactgcagaggcttatggggaagataatgaaaagcttttaggcgaacgatcaagccttttaaagacaaggttgtggtagcgagcaagtttgggatttactacgcagatcctaatgacaaatacgcaacc

SEQ ID NO: 216 - protein, 75 aa, Helicobacter pylori
MQQRHLGPLKVGALALGCMGMTYGYGEVHDKKQMVKLIHKALELGINFFDTAEAYGEDNEKLLGERSSLLKTRLW

SEQ ID NO: 217 - DNA, 649 bp, Helicobacter pylori
  CDS (51)...(596)
cgaattgctgtatagttagcgtttttaattcaaaatgaagtgaggaaacaatgaaaaaagcgttaatatccaccctttttggtgttagtttggcgtttgcaaaaccttatacgattgataaggcaaactctagcgtgtggtttgaggtcaaacacttcacgttcaatgaaacaagaggcgcgtttgataattttgatggcaaaattgatctagagcccaacactaaaatgctcagcgtttttgaaggcaatattgatgtgaaaagcgtcaatactagggatagaaaaagagataaccacttgaaaacagcggacttttttgatgtggtaaaataccccaaagggagctttaaaatgaccaaatacgaagatggtaaaatctatggggatttgactcttcgtggcgtaaccaagcctgtcgtattggaagccaaaatccaagcccccttacaaaaccccatgaataaaaaagaattcatggtgttacaagctgaaggcaaaatcaaccgcaaggattttggtatcggtaaaacctttagcgatgctgtcgttggagatgaggtaaagattgagctcaaactagaagcttacgcccaataatcgttttgcaagagatagatatcttcttctcttgcgtttttctaacagca

SEQ ID NO: 218 - protein, 182 aa, Helicobacter pylori
MKKALISTLFGVSLAFAKPYTIDKANSSVWFEVKHFTFNETRGAFDNFDGKIDLEPNTKMLSVFEGNIDVKSVNTRDRKRDNHLKTADFFDVVKYPKGSFKMTKYEDGKIYGDLTLRGVTKPVVLEAKIQAPLQNPMNKKEFMVLQAEGKINRKDFGIGKTFSDAVVGDEVKIELKLEAYAQ

SEQ ID NO: 219 - DNA, 478 bp, Helicobacter pylori
  CDS (51)...(425)
tccgttcgcaacaagaattttcttgttatcttaatgtaaaggtcaaaacgatgaaaaagttagccgctttatttttagtaagcgtgttgggggttatgggtttaaacgcatgggagcaaaccctaaaagctaatgacttggaagtgaaaatcaaatccgtgggtaaccccattaaaggcgataacactttcattctcagccccactttaaaaggtaaggctttagaaaaagctatcgttagggtgcagtttatgatgcctgaaatgcccggcatgccagcgatgaaagaaatggcgcaagtgagtgaaaaaaacggcctttatgaagctaaaaccaatctttctatgaacgggacatggcaggttagggtggatattaaatctaaagagggtcaggtttatcgcgctaaaacaagcctggatttataagagcatgctatcttttataagcgcgtttgataaaaggggcgtttcaatac

SEQ ID NO: 220 - protein, 125 aa, Helicobacter pylori
MKKLAALFLVSVLGVMGLNAWEQTLKANDLEVKIKSVGNPIKGDNTFILSPTLKGKALEKAIVRVQFMMPEMPGMPAMKEMAQVSEKNGLYEAKTNLSMNGTWQVRVDIKSKEGQVYRAKTSLDL

SEQ ID NO: 221 - DNA, 1117 bp, Helicobacter pylori
  CDS (51)...(1064)
agcgctttaaatagcacttatttgtctttacaaaaccttaaaggattagaatgaaacggattttatggttagccttgattttattttttagccccttattcgctaacgctcaaaaaactcaagaaattaaaaaaactaaagaagctaaaagccaaacccgttttaatatttccaccactaaggtcatagaaaaagaattttctcaaagccggcgctattacgcgcttttagagcccaatgaagcgctgattttttctcaaaccctgcgttttgatggctatgtggaaaagctttatgcgaataaaacctatacccccattaaaaagggcgacaggttattgagcgtgtattcccctgaattagtgagcgctcaaagcgaattgctatcatcattgaaattcaaccaacaagtgggagcgattaaagaaaaattaaaactattagggttagaaaactctagcattgaaaaaatcattagcagccataaagtccaaaatgaaatgactatttactctcacttcaacggcattatttttaaaaaaagcccggatctcaatgaggggagcttcattaaaaaagggcaagagttgtttcaaatcatagatttaagccaattgtgggcgctggttaaagtcaatcaagaggatttagaatttttaaaaaacacgcataaagcgatcttgtttgtagaagggattaaaggcgagcaagaaatcacgcttgaaaatatcaaccccatcatcaacaaagaagataaaatgctagaagcgcgcttcaatgtgcctaatgttaaacagatttattaccctaacatgttcgctcaagtagaaatctttcaaaaaccacaaaaaatgaagattttgcctaaagaagcggttttgattaaaggggggaaagctatcgtgtttaaaaaagacgattttggcttaagcccgttagaaattaaagccgtccgcttgagcgatgggagttatgagattttagagggtttaaaggcgggcgaagaagtcgctaataacgctttattcgtgctagacgctgacgctcaaaacaatggggattattgaatgatagaaaagatcattgatttaagcgttaaaaacaaactccttaccac

SEQ ID NO: 222 - protein, 338 aa, Helicobacter pylori
MKRILWLALILFFSPLFANAQKTQEIKKTKEAKSQTRFNISTTKVIEKEFSQSRRYYALLEPNEALIFSQTLRFDGYVEKLYANKTYTPIKKGDRLLSVYSPELVSAQSELLSSLKFNQQVGAIKEKLKLLGLENSSIEKIISSHKVQNEMTIYSHFNGIIFKKSPDLNEGSFIKKGQELFQIIDLSQLWALVKVNQEDLEFLKNTHKAILFVEGIKGEQEITLENINPIINKEDKMLEARFNVPNVKQIYYPNMFAQVEIFQKPQKMKILPKEAVLIKGGKAIVFKKDDFGLSPLEIKAVRLSDGSYEILEGLKAGEEVANNALFVLDADAQNNGDY

SEQ ID NO: 223 - DNA, 1249 bp, Helicobacter pylori
  CDS (51)...(1196)
aaaacttagataaaataacacgataaaaccatagtaataaagataaccccatgagatttttttgctttttcttattttttctaaccttttcaaacgcacagataatgatgacttttgattctcaaactaacgccaaactctcgcgctctaacgaacagctttcagacatgctctataaactcaatgaaagtttaagaatctatcaaagcgtgctttccaataaccaagatcaactcaaagaaatcaaaaaagctaacagcaccctaaatagccaaaggcgtttttttaacgccagccagatccgccttatggacactgatgcactattgaaacaaagcgctttggaattagaaaaattacaagctttagaaaaacacataaaaaagggcatggaacaagaacgcttaatagaagaatcccaaacgctttttttacaagagcattgcccttatttgagcggcgttaagaatttagaagaggcttcaaacgctttagaagtccaagagcaaaacaacgcccttttcttactcaaagagcctaaactcgcccgtttgctctcacgattggatttgatgagcgctttaaacgccttgtgcgatcaggttttagaaaaccaagcccataaccaacaatcccataacaaaattttagaatacaacgctcttaaaaaccatgattttcaagcctataaagccatgcgtttgaaaaaatttaaaaacaagcttcaaagtcaaatccaagcccaagaagacgctctaaaaacctttttacccttagaaaaacgcttggaaactttaaaaacgcattttttatgcgataaagaaaacctaaaatcatgcgctaaagaattgcaccaacgctaccaaaacgcccttatagagcgagataaagaattaaaaaacgctaaaaataataaagaaaagcatgctctaatcttagccaattacgagcatactttaaaaaccttgaatatagaatttttaagcgaattaaataagcaaatggcgtttttgaatgaaaccatggcgttaaacgcccgagttttagcccttttagccaaacagcatgccaaaacgccaaagcctttcaatttgagcggtggtttaagcggtgatttgagcggtgggaaagctcttattaaaaatatccgcttagatccgcatggattccctagctttaaaaattttaagcaagagtaggacaatatttgacaagcaaaaacaattatagtaaaataagagcataactt

SEQ ID NO: 224 - protein, 382 aa, Helicobacter pylori
MRFFCFFLFFLTFSNAQIMMTFDSQTNAKLSRSNEQLSDMLYKLNESLRIYQSVLSNNQDQLKEIKKANSTLNSQRRFFNASQIRLMDTDALLKQSALELEKLQALEKHIKKGMEQERLIEESQTLFLQEHCPYLSGVKNLEEASNALEVQEQNNALFLLKEPKLARLLSRLDLMSALNALCDQVLENQAHNQQSHNKILEYNALKNHDFQAYKAMRLKKFKNKLQSQIQAQEDALKTFLPLEKRLETLKTHFLCDKENLKSCAKELHQRYQNALIERDKELKNAKNNKEKHALILANYEHTLKTLNIEFLSELNKQMAFLNETMALNARVLALLAKQHAKTPKPFNLSGGLSGDLSGGKALIKNIRLDPHGFPSFKNFKQE

SEQ ID NO: 225 - DNA, 490 bp, Helicobacter pylori
  CDS (51)...(437)
ttgttgagaaaatccgatgttttgagcgaaaaattcaggatcatgaaaaaatgaaaagcatcagaagaggcgatgggctgaatgttgtccctttcattgatattatgctcgttttgctagcgattgtgttgagcatttctacttttattgcacaaggtaagattaaggtcagtctccctaacgctaaaaatgcggaaaaatcccagccaaacgatcaaaaagtggtggtcatctctgtagatgagcatgacaatattttcgtagatgacaaaccgatgaatttagaagctttgagcgctgtagtcaaacaaacagaccctaaaacccttatagacttaaaaagcgacaaaagctctcgttttgaaacttttatcagcattatggatattttaaaagagcataatcatgaaaatttctccatctccacgcaagctcagtaaagtttcaacgagtgttagctttttaatctcttttgccctatacgctatag

SEQ ID NO: 226 - protein, 129 aa, Helicobacter pylori
MKSIRRGDGLNVVPFIDIMLVLLAIVLSISTFIAQGKIKVSLPNAKNAEKSQPNDQKVVVISVDEHDNIFVDDKPMNLEALSAVVKQTDPKTLIDLKSDKSSRFETFISIMDILKEHNHENFSISTQAQ

SEQ ID NO: 227 - DNA, 958 bp, Helicobacter pylori
  CDS (51)...(905)
tcgttttgaaacttttatcagcattatggatattttaaaagagcataatcatgaaaatttctccatctccacgcaagctcagtaaagtttcaacgagtgttagctttttaatctcttttgccctatacgctatagggtttggctattttttactgcgcgaagacgccccagagcctttagcgcaagccgggaccactaaggttaccatgagtttagccagcatcaacactaattccaatacaaagactaatgctgagtcggctaaacccaaagaagagcctaaagaaaaacccaagaaagaagagccaaaaaaagaagaacccaaaaaggaggttacaaagcctaaacctaagcctaaacccaagccaaagccaaaaccaaaacctaagcctgaacccaaacctgaaccaaaacccgagcctaagcctgagcctaaagttgaagaggttaaaaaagaagagcctaaagaagagcccaaaaaagaagaagctaaagaggaagctaaagaaaaaagcgctcctaaacaagtaacaactaaggatatagtcaaagaaaaagacaagcaagaagaatccaacaaaacctctgagggggccacttctgaagctcaagcttataacccaggggtgagcaacgaatttttaatgaagatccaaaccgctatttcttctaaaaaccgctaccctaaaatggcgcagattaggggtattgagggcgaagtgttggtgagctttacgatcaatgctgatgggagcgttacggacattaaagtggtcaaaagcaacaccacagatattttaaaccatgcggctttagaagccattaaaagcgcggcacatctattccctaaaccagaagaaaccgtgcatctaaaaatccctatcgcttatagcttgaaagaagactgattagtctttcttttaggggcgattcaagccttaaaagccgggtcaaaatc

SEQ ID NO: 228 - protein, 285 aa, Helicobacter pylori
MKISPSPRKLSKVSTSVSFLISFALYAIGFGYFLLREDAPEPLAQAGTTKVTMSLASINTNSNTKTNAESAKPKEEPKEKPKKEEPKKEEPKKEVTKPKPKPKPKPKPKPKPKPEPKPEPKPEPKPEPKVEEVKKEEPKEEPKKEEAKEEAKEKSAPKQVTTKDIVKEKDKQEESNKTSEGATSEAQAYNPGVSNEFLMKIQTAISSKNRYPKMAQIRGIEGEVLVSFTINADGSVTDIKVVKSNTTDILNHAALEAIKSAAHLFPKPEETVHLKIPIAYSLKED

SEQ ID NO: 229 - DNA, 757 bp, Helicobacter pylori
  CDS (51)...(704)
ttgatgaaaaaaataacgctcctctttttaaaactcttttagaggatgccatgagagtgtcttctaaagagattttactcattgtgggggggagcagtttttacctcaaatccattttagaaggtttgagccgcatgccaaaactgagcggtgaggaggttgtaaaaatagagcgagaaattgccactctttctaacccttatatatttttaaaatccattgaccctaacatggcttttaaaatccatccaaacgacacttaccgcacccataaggctttagaaatcttttatgccacctgcacgcccccaagcgagtattttaaggccaaccctaaaaaaccctttgagcatgctatctccttattcgctctgtctattgaaaaaagcgcgctccataacaatatcaaacggcgcaccaaaaacatgctccattcagggcttgttgaagaaatcaaagccctctatactcaataccctaaagattcgcagccttttaaagccataggcgttaaagagagcgttctttttttagaaaaacgactcactttaaaggagctagaagaagcgattacctctaacaccatgaaattagccaagcgccaaaacactttcaataaaacccaattcaataacctttatgtggggagcgctgaagaagttaggcatgcgattttaaaacactcaaaaagcggcattaaaggataatctaatggatacacaaaacttacccgatcaaattatccctatttttatga

SEQ ID NO: 230 - protein, 218 aa, Helicobacter pylori
MRVSSKEILLIVGGSSFYLKSILEGLSRMPKLSGEEVVKIEREIATLSNPYIFLKSIDPNMAFKIHPNDTYRTHKALEIFYATCTPPSEYFKANPKKPFEHAISLFALSIEKSALHNNIKRRTKNMLHSGLVEEIKALYTQYPKDSQPFKAIGVKESVLFLEKRLTLKELEEAITSNTMKLAKRQNTFNKTQFNNLYVGSAEEVRHAILKHSKSGIKG

SEQ ID NO: 231 - DNA, 454 bp, Helicobacter pylori
  CDS (51)...(401)
ctatatgaacaaagccttaaaagacttgaaaaaaggaataactcatacctatgcgaaacaataaaacgccttttttgagcgcgatttttacggcatcaattaggggttaccaacgctttttttcggctttcaccccttcaagctgccggttttaccccacttgttccaactacgctctgtggttgctctgttttgaaagccctttgagcgctatgggtaagatcgctataaggatactctcatgcaaccctttttgctctgggggcattgcttaccctactactcgcttgaaacgcccaagcctgatccaatctcataaagattctaatcgcaattttaaaaccatcactttttggctcgttcccacaaaaagccacgcaacttactacatcattaaggtttaatcacaatggataaaaacaacaataatctccgcttgattttagcgatcgct

SEQ ID NO: 232 - protein, 117 aa, Helicobacter pylori
MRNNKTPFLSAIFTASIRGYQRFFSAFTPSSCRFYPTCSNYALWLLCFESPLSAMGKIAIRILSCNPFCSGGIAYPTTRLKRPSLIQSHKDSNRNFKTITFWLVPTKSHATYYIIKV

SEQ ID NO: 233 - DNA, 1153 bp, Helicobacter pylori
  CDS (51)...(1100)
ttataataagaaagtttttattatttttaatgctattttaggagttcatcatgaaaaaatccattttattgggcgtttgcttggctttttcttgcgctcatgccctaaacgatttagaattgatcaaaaaagcgagggaaagccagctagaacccatgcctatgggcaaagcgctcaaagaataccagattaaaaagaccagagatgtgggtattggcaccaaaaacagcgaaatcatgacctccgctcaagtggaattaggcaaaatgctctattttgaccctaggatttccacttcctacctcgtgtcttgcaacacatgccataatctgggcttaggcggggtggatttagtcccaagcgccataggctctcaatggaagaaaaacccccaccttttaagctccccaacggtgtataactctgtgtttaacgatgtgcagttttgggatggcagggttacgcatttaaacgaacaggcgcaagggcccatccagtcttcttttgaaatgggggctgatcccaaagtggtggtagaaaaaatcaattccatgccaggctatgtcaagctctttagaaaagcctatggctctaaagtcaaaattgattttaaattgatcgctgatagtatcgctatgtttgaagccacgcttattaccccaagccgttacgacgattttttaagaggcaatcctaaagcgctcagcaaagccgaaaaagaggggctgaatttattcatttctaaaggctgtgtggcttgccataacggcattaatcttgggggaacgatgcagccttttggggtggtcaaaccttataaattcgctaatgtgggcgatttcaaaggcgataaaaacgggcttgtgaaagtgcctactttaaggaatatcaccgaaacgatgccctatttccataacgggcaattctgggatgttaaggatgcgattaaagaaatgggctctatccagttaggcattgaaatcagcgatgaagaagcgaaaaaaattgaaactttctttggagccttaaggggtaaaaaacctaaaataatctacccagaactccccataatgacagacaaaacccctaaaccctctttttgatttaaaaaagtccttttaggggtctttggcgctaaatctaaaaaatactc

SEQ ID NO: 234 - protein, 350 aa, Helicobacter pylori
MKKSILLGVCLAFSCAHALNDLELIKKARESQLEPMPMGKALKEYQIKKTRDVGIGTKNSEIMTSAQVELGKMLYFDPRISTSYLVSCNTCHNLGLGGVDLVPSAIGSQWKKNPHLLSSPTVYNSVFNDVQFWDGRVTHLNEQAQGPIQSSFEMGADPKVVVEKINSMPGYVKLFRKAYGSKVKIDFKLIADSIAMFEATLITPSRYDDFLRGNPKALSKAEKEGLNLFISKGCVACHNGINLGGTMQPFGVVKPYKFANVGDFKGDKNGLVKVPTLRNITETMPYFHNGQFWDVKDAIKEMGSIQLGIEISDEEAKKIETFFGALRGKKPKIIYPELPIMTDKTPKPSF

SEQ ID NO: 235 - DNA, 426 bp, Helicobacter pylori
  CDS (51)...(374)
gttagagatttctcccaattctcaagtgggagcgagcgtgaaaatccgctatgaaagcaatctttagcctctttttccttcttattgttttaaaagcaaaccccataaaccctttattagagccgttatatttccccagttacgcgcaatttttaaacttagcacctcactttgtcattaaaaaaaagcgcgcttatagaccctttcaatgggggaataccattatcatcaaacgccatgatttagaagaacgccaaagcaaccagccaagcgatattttccgccaaaacgctgaaatcaatgtgtcttctcaaacttttttaaaaggaatgagcaacgcttcttcacgaacagtgcttgattcagccgctcagtaaaatgctaaaactttttttaatcacatttttcttggtattttcttaatcc

SEQ ID NO: 236 - protein, 108 aa, Helicobacter pylori
MKAIFSLFFLLIVLKANPINPLLEPLYFPSYAQFLNLAPHFVIKKKRAYRPFQWGNTIIIKRHDLEERQSNQPSDIFRQNAEINVSSQTFLKGMSNASSRTVLDSAAQ

SEQ ID NO: 237 - DNA, 799 bp, Helicobacter pylori
  CDS (51)...(746)
agcgtgagcccaattacgccacgcctatgtctagataggggaggttggaaatgtttagttttttagaaaaaaacccgttctttttcactcttgcgtttatttttgtgtttgcgatcgcgggcttggtggagattttgcccaacttcttcaaatccgctcgcccgattgaaggcttacggccttatacggttttagagacagcggggaggcaaatttatatccaagaaggttgctatcattgccattcccagcttattcgccctttccaagctgaggtggatcgatatggcgcgtatagtttgagtggggaatacgcgtatgacaggccatttttgtggggttctaaaaggattggccctgatttgcacagggtaggggattatcgcacaaccgattggcatgaaaagcacatgtttgatcctaaaagcgttgtgccgcacagcatcatgcccgcctataagcatttatttacaaaaaagagcgattttgacaccgcttatgcagaagctttgacgcaaaaaaaggtttttggcgtgccttatgacacagaaaacggcgtgaaattagggagcgtagaagaagcgaaaaaagcctatttagaagaagctaaaaaaatcacagccgatatgaaagacaagagggtgctagaagcgattgagagaggtgaagtgttagaaattgtggctttgatcgcttatttgaatagcttgggtaattccaggatcaacgccaatcaaaacgctaaataaggggtgaatgatggatttagaaagtttgagaggttttgcgtatgcgtttt

SEQ ID NO: 238 - protein, 232 aa, Helicobacter pylori
MFSFLEKNPFFFTLAFIFVFAIAGLVEILPNFFKSARPIEGLRPYTVLETAGRQIYIQEGCYHCHSQLIRPFQAEVDRYGAYSLSGEYAYDRPFLWGSKRIGPDLHRVGDYRTTDWHEKHMFDPKSVVPHSIMPAYKHLFTKKSDFDTAYAEALTQKKVFGVPYDTENGVKLGSVEEAKKAYLEEAKKITADMKDKRVLEAIERGEVLEIVALIAYLNSLGNSRINANQNAK

SEQ ID NO: 239 - DNA, 322 bp, Helicobacter pylori
  CDS (51)...(269)
cttgggtaattccaggatcaacgccaatcaaaacgctaaataaggggtgaatgatggatttagaaagtttgagaggttttgcgtatgcgttttttaccattctttttacgctctttttgtatgcctatatttttagcatgtatagaaagcaaaaaaaaggcattatggattatgagcgatacggatacttagcgttaaatgatgctttagaagacgagttgattgaaccacgccataaaaaagttcatgataatggcataaaggaaagttgaaatggattttttaaacgaccatataaatgtttttggcttgattgcagcgc

SEQ ID NO: 240 - protein, 73 aa, Helicobacter pylori
MMDLESLRGFAYAFFTILFTLFLYAYIFSMYRKQKKGIMDYERYGYLALNDALEDELIEPRHKKVHDNGIKES

SEQ ID NO: 241 - DNA, 1021 bp, Helicobacter pylori
  CDS (51)...(968)
ttactgatttttctttgtgtgagctttggcttagttttgtaaggaatgagatgataaagagttggactaaaaagtggtttttgattttatttttaatggcaagttgttccagttatttggtggctacaaccggtgagaaatattttaaaatggctactcaagcctttaagagaggggactaccataaagcggtggctttttataagaggagctgtaatttaagggtgggggttggttgcacgagtttaggctctatgtatgaagatggcgatggcgtggatcagaatattacaaaagccgttttttattacagaagagggtgtaatttaaggaatcatctcgcttgcgcgagtctaggctctatgtatgaagatggcgatggtgtgcaaaaaaaccttccaaaggctatctattattacaggagagggtgccacttaaagggtggggtgagctgtgggagtttaggttttatgtattttaatggcacgggcgttaagcaaaattatgccaaagccctttttctttctaaatacgcttgcagtttgaattacggcattagttgtaactttgtagggtatatgtataggaacgccaaaggcgtacagaaggatttgaaaaaagcccttgcgaattttaaaagagggtgccatttgaaagacggagcgagttgtgtgagcttgggatacatgtatgaagtcggtatggatgtcaaacaaaatggagagcaagccttgaatctttataaaaagggttgttatttaaaaagggggagcggttgtcataatgtggcggtgatgtattacaccggtaagggcgttccaaaggatttagataaagccatttcgtattataagaaaggttgcactctaggctttagtggtagctgtaaagtgttagaagaagtgattggcaagaagtctgatgatttgcaagatgacgcgcaaaacgacacgcaagatgatatgcaataagttaaagcttatggactaatgattaaaactcatcttatagaaatctttct

SEQ ID NO: 242 - protein, 306 aa, Helicobacter pylori
MIKSWTKKWFLILFLMASCSSYLVATTGEKYFKMATQAFKRGDYHKAVAFYKRSCNLRVGVGCTSLGSMYEDGDGVDQNITKAVFYYRRGCNLRNHLACASLGSMYEDGDGVQKNLPKAIYYYRRGCHLKGGVSCGSLGFMYFNGTGVKQNYAKALFLSKYACSLNYGISCNFVGYMYRNAKGVQKDLKKALANFKRGCHLKDGASCVSLGYMYEVGMDVKQNGEQALNLYKKGCYLKRGSGCHNVAVMYYTGKGVPKDLDKAISYYKKGCTLGFSGSCKVLEEVIGKKSDDLQDDAQNDTQDDMQ

SEQ ID NO: 243 - DNA, 1000 bp, Helicobacter pylori
  CDS (51)...(947)
ctataatgtgaatttaatgatgaaaattagtttagagtggagaacacacaatgaaaaaaaatatcttaaatttagcgttagtgggtgcgttgagcacgtcgtttttgatggctaagccggctcataacgcaaataacgctacgcataacacgaaaaaaacgactgattcttcagcaggcgtgttagcgacagtggatggcagacctatcactaaaagcgattttgacatgattaagcaacgaaatcctaattttgattttgacaagcttaaagagaaagaaaaagaagccttgattgatcaagctattcgcaccgcccttgtagaaaatgaagctaaaaccgagaaattggacagcactccagaatttaaagcgatgatggaagcggttaaaaaacaggctttagtggaattttgggctaaaaaacaggctgaagaagtgaaaaaagtccaaatcccagaaaaagaaatgcaagatttttacaacgctaacaaagatcagctttttgtcaagcaagaagcccatgctaggcatattttagtgaaaaccgaagatgaggctaaacggattatttctgagattgacaaacagccaaaggctaaaaaagaagctaaattcattgagttagccaatcgggatacgattgatcctaacagcaagaacgcgcaaaatggcggtgatttggggaaattccaaaagaaccaaatggctccggatttttctaaagccgctttcgctttaactcctggggattacactaaaacccctgttaaaacagagtttggttatcatattatctatttgatttctaaagatagccctgtaacttatacttatgaacaggctaaacctaccattaaggggatgttacaagaaaagcttttccaagaacgcatgaatcaacgcattgaggaactaagaaagcacgctaaaattgttatcaacaagtaattgatgaggtgttatcatgttagttaaaggcaatgaaattttattgaaag

SEQ ID NO: 244 - protein, 299 aa, Helicobacter pylori
MKKNILNLALVGALSTSFLMAKPAHNANNATHNTKKTTDSSAGVLATVDGRPITKSDFDMIKQRNPNFDFDKLKEKEKEALIDQAIRTALVENEAKTEKLDSTPEFKAMMEAVKKQALVEFWAKKQAEEVKKVQIPEKEMQDFYNANKDQLFVKQEAHARHILVKTEDEAKRIISEIDKQPKAKKEAKFIELANRDTIDPNSKNAQNGGDLGKFQKNQMAPDFSKAAFALTPGDYTKTPVKTEFGYHIIYLISKDSPVTYTYEQAKPTIKGMLQEKLFQERMNQRIEELRKHAKIVINK

SEQ ID NO: 245 - DNA, 376 bp, Helicobacter pylori
  CDS (51)...(323)
cagcgttggtgtattttggaggaagttaggaaaatattgaaggagtattgatgaaaaaggttgtttttttattgttagttatactagggggtttagaagcgcaaagtacttattgcagtgatcattgcgaaggcacgccagatagccgtatccctcctatggggtttcatttcagttttgtgcattcagtgaaatattacttgcaagatccgcaagagcgcgatcacaagcttgaaaaatgccatcaagcctttgattcgactcttaaggttaattttattacgaatcttttaaaaaggattgcaagcatgcgcaaatggctttagagcaagcccaaaaagggactccataaaaggggtttctttagggattttat

SEQ ID NO: 246 - protein, 91 aa, Helicobacter pylori
MKKVVFLLLVILGGLEAQSTYCSDHCEGTPDSRIPPMGFHFSFVHSVKYYLQDPQERDHKLEKCHQAFDSTLKVNFITNLLKRIASMRKWL

SEQ ID NO: 247 - DNA, 1180 bp, Helicobacter pylori
  CDS (51)...(1127)
tttttagttataatggcggacaccattaaaattaaaacaaaggttattcaatgaaggtattatcttatttgaaaaatttttatctttttttagcgataggagcaattatgcaagcgagtgaaaacatgggatctcaacaccaaaaaaccgatgaaagagtgatttacttggctggggggtgtttttgggggctagaggcgtatatggagaggatttatggcgtcatagacgcaagctctggttacgctaacggcaagacttcaagcacgaattatgagaaattgcatgaaagtgatcatgctgaaagcgtgaaagtcatttatgatcctaaaaaaatcagtttggacaaattgttgcgttactattttaaggtggttgatccggtgagcgtgaacaagcagggtaatgatgtgggcaggcagtatcgcacggggatttattatgtcaatagcgcggataaagaagtgatagatcatgccttaaaagcgttacagaaagaagtgaaaggtaaaatcgctattgaagtagagcctttaaaaaattatgtgagggctgaagagtatcatcaggattatttgaagaaacaccctagtggttattgccatattgatttgaaaaaggcggatgaagtgattgtggatgacgataaatacaccaaacctagcgatgaagttttaaagaaaaaactcaccaaactccagtatgaggttacgcaaaacaaacacactgagaaaccctttgaaaacgagtattacaacaaagaagaagagggcatttatgtggatattaccacaggcgagccgttattttcttcagcggataaatacgactccggttgcgggtggccaagcttttctaagcctatcaataaagatgtggtgaaatacgaagacgatgagagccttaataggaaacgcattgaagtgttgagccgtattggtaaggcgcatttagggcatgtgtttaacgatgggcctaaagaattagggggcttaaggtattgcatcaacagcgcggctttaaggtttatccccttaaaagacatggaaaaagagggttatggcgagtttatcccttatatcaaaaagggtgaattgaaaaaatacatcaatgataaaaagtcgcattaaggggtaatgactaagccccctaaggggggttaaaatgaggggtttaagcg

SEQ ID NO: 248 - protein, 359 aa, Helicobacter pylori
MKVLSYLKNFYLFLAIGAIMQASENMGSQHQKTDERVIYLAGGCFWGLEAYMERIYGVIDASSGYANGKTSSTNYEKLHESDHAESVKVIYDPKKISLDKLLRYYFKVVDPVSVNKQGNDVGRQYRTGIYYVNSADKEVIDHALKALQKEVKGKIAIEVEPLKNYVRAEEYHQDYLKKHPSGYCHIDLKKADEVIVDDDKYTKPSDEVLKKKLTKLQYEVTQNKHTEKPFENEYYNKEEEGIYVDITTGEPLFSSADKYDSGCGWPSFSKPINKDVVKYEDDESLNRKRIEVLSRIGKAHLGHVFNDGPKELGGLRYCINSAALRFIPLKDMEKEGYGEFIPYIKKGELKKYINDKKSH

SEQ ID NO: 249 - DNA, 898 bp, Helicobacter pylori
  CDS (51)...(845)
ttatttcttattattgtaaggatttaggctattgaactttaggagttttaatgatattaagagcgagtgtgttgagcgcgttacttcttgtaggcttaggggcagcccctaaacattcagtttcagctaatgacaaacggatgcaggataatttagtgagcgtgattgaaaaacagaccaataaaaaggtgcgtattttagaaatcaaacctttaaaatctagccaggatttaaaaatggtcgttattgaagatccggacactaaatacaatatcccgcttgtggtgagtaaggatggtaatttaatcatagggcttagcaacatattctttagcaataaaagcgatgatgtgcaattagttgcagaaaccaatcaaaaagttcaagctcttaacgccacccaacaaaatagcgcgaaattgaacgctatttttaatgaaataccggctgattatgcgatagagttgccctctactaacgctgcaaataaggataaaatcctttatattgtctctgatcccatgtgcccacattgccaaaaagagctcactaaacttagggatcatttaaaagaaaacaccgtgagaatggtcgtggtggggtggcttggggtcaattcagctaaaaaagcggctttaatccaagaagaaatggcgaaagctagggctaggggagcgagcgtggaagataagatctctattcttgaaaagatttattccacccaatacgatattaacgctcaaaaagagcctgaagatttacgcactaaagtggaaaataccactaaaaagatttttgaatctggcgtgattaagggtgtgcctttcttataccattataaggcatgatataaggttgctctcatgaaaaaaccctataggaagatttctgattatgc

SEQ ID NO: 250 - protein, 265 aa, Helicobacter pylori
MILRASVLSALLLVGLGAAPKHSVSANDKRMQDNLVSVIEKQTNKKVRILEIKPLKSSQDLKMVVIEDPDTKYNIPLVVSKDGNLIIGLSNIFFSNKSDDVQLVAETNQKVQALNATQQNSAKLNAIFNEIPADYAIELPSTNAANKDKILYIVSDPMCPHCQKELTKLRDHLKENTVRMVVVGWLGVNSAKKAALIQEEMAKARARGASVEDKISILEKIYSTQYDINAQKEPEDLRTKVENTTKKIFESGVIKGVPFLYHYKA

SEQ ID NO: 251 - DNA, 760 bp, Helicobacter pylori
  CDS (51)...(707)
tcttttagacgaaaacgccatgattttacactggcaaaaagagggcttgcatgcgtaaaatcttgttattgggtctgattttacaagcgctcttcagcgaagaagccgcgcaagaattgttgcaatgctctgcgatttttgaatctaaaaaagccgaattgaaagacgatttgcgccgattgagtgaaaaagagcagtctttaaggatcttgcaaaccgaaaacgcccgccttttagatgaaaaaaccgatctgttgaaccaaaaagaaaaagaagtggaagaaaaactgaaaaatttagccgctaaagaagaagcctttaaaaccttacaaacggaagaaaaaaaacgccttaaaaatttgatagaagaaaacgaaggcattttaagagaaatcaagcaggctaaagacagcaagattggcgagacttattctaaaatgaaagattctaaatcggctctgattttagaaaatttacccactcaaaacgcattagaaattttaatggcgctaaaaccccaagaactcggtaaaattttagccaaaatggatcctaaaaaagcggcggctttgacagagttgtggcaaaaacccccaaaagaaaataaagaaatcccaaaaaccacagcacccacgccccctatagcacccacgcctttaaaagagccgatgataaaagatcctaacaccaaagagcctgcaggggtatgatgttcattgtagcggttttgatgctggcgtttttaatctttgtccatgaa

SEQ ID NO: 252 - protein, 219 aa, Helicobacter pylori
MRKILLLGLILQALFSEEAAQELLQCSAIFESKKAELKDDLRRLSEKEQSLRILQTENARLLDEKTDLLNQKEKEVEEKLKNLAAKEEAFKTLQTEEKKRLKNLIEENEGILREIKQAKDSKIGETYSKMKDSKSALILENLPTQNALEILMALKPQELGKILAKMDPKKAAALTELWQKPPKENKEIPKTTAPTPPIAPTPLKEPMIKDPNTKEPAGV

SEQ ID NO: 253 - DNA, 1393 bp, Helicobacter pylori
  CDS (51)...(1340)
ctaaagtgcgctaaaattcacttcagtgatacaaaaaaggaaataaaataatgaatattcaaataaagaaaaggtttttagcaaatttgttgctttttagcctgttttgccttaaggctgaaaccctttcagaagatcatcaaatcctgttgagttcagacgctttccatagaggggattttgctgccgctcaaaaaggctatatgaatctctataagcaaaccaataaggtggtgtatgctaaagaagcggccatttcagcggcgagcttaggggatattaaaaccgctatgcatttagccatgctctatcaaaaaatcaccaataatcgtaatgatgtttctatcaataagattttagtggatggctatgcgcaaatggggcagattgataaggcgattgaattgctgcacaaaatccgtaaagaagaaaagaccatagccacagacaatgtgttagggactttgtatttgactcaaaagcgtttggataaggctttcccattgttgaataagttttataaccaagtgcatgatgaagacagcctagaaaaactcattacgatctattttttgcaaaatcgtaaaaaagagggcttggatttgttgcaatctcatatagacaggtatggttgctcagagcaattgtgccaaaaagcgctcaacactttcacgcaatttaacgagcttgatttggctaaaacgacttttgctcgtttgtatgaaaaaaaccctattgttcaaaatgctcagttttacataggggtattaatcttgttaaaagagtttgataaggcccagaaaatcgcagaattattcccttttgacaggcgtttgttgttagacttatacaccgcacaaaaaaaattcgatcaagcttccaaacaagcttctttgatctatcaagaaaaaaaagaccctaaattcttaggattagaggccatttatcattatgaaagcttgagtgcgaataagaaaaagctcaccaaagaagagatgttgcctatcattcaaaaattagagcaagccaccaaagagcgccaagcatggctcgctaaaaccaaagataaagaagacgcgcaagacgctttcttttataattttttagggtattccttaatagattatgacatggatattaaaaggggcatggattttgtgaggaaagccttagcgttggattctggatcagtgctttatttggattctttagcatggggttattacaaattagggaattgtttggaagctaaaaaaatcttttctagcatcgctaaagagtctatccaagccgaacctgaattgaaagaacacaataaaatcattcaagaatgcaagaaatagggattttagaaaatttacaaaaaagcttagccttaaaagagggcatgctt

SEQ ID NO: 254 - protein, 430 aa, Helicobacter pylori
MNIQIKKRFLANLLLFSLFCLKAETLSEDHQILLSSDAFHRGDFAAAQKGYMNLYKQTNKVVYAKEAAISAASLGDIKTAMHLAMLYQKITNNRNDVSINKILVDGYAQMGQIDKAIELLHKIRKEEKTIATDNVLGTLYLTQKRLDKAFPLLNKFYNQVHDEDSLEKLITIYFLQNRKKEGLDLLQSHIDRYGCSEQLCQKALNTFTQFNELDLAKTTFARLYEKNPIVQNAQFYIGVLILLKEFDKAQKIAELFPFDRRLLLDLYTAQKKFDQASKQASLIYQEKKDPKFLGLEAIYHYESLSANKKKLTKEEMLPIIQKLEQATKERQAWLAKTKDKEDAQDAFFYNFLGYSLIDYDMDIKRGMDFVRKALALDSGSVLYLDSLAWGYYKLGNCLEAKKIFSSIAKESIQAEPELKEHNKIIQECKK

SEQ ID NO: 255 - DNA, 1090 bp, Helicobacter pylori
  CDS (51)...(1037)
  misc_feature 673: n = A,T,C or G
ttaccctaaaacgctatttttaaaataatccattaaaataaaggcgaggaatgaaaagatttgttttgtttttattgttcatgtgcgtttgcgttcaagcttacgccgagcaagattacttttttagggattttaaatctagagatttgccccaaaaactccatcttgataaaaagctctcccaaacaatacagccatgcatgcaacttaacgcatcaaaacactacacttctaccggggttagagagcctgataaatgcacaaagagttttaaaaaatccgctctcatgtcctatgacttagcgctaggttatttggtgagtaagaataagcaatacggcttaaaggctatagaaattttaaacgcttgggctaaagagcttcaaagcgtggatacttatcagagcgaggataatatcaatttttacatgccttatatgaacatggcttattggtttgtcaaaaaggcgtttcctagcccagaatatgaagatttcattaagcggatgcgccagtattctcaatcagctcttaacactaaccatggggcgtggggcattctttttgatgtgagttctgcgctagcgttagacgataatgcccttttgcacaatagcgctaatcggtggcaggagtgggtgtttaaagccatagatgagaatggggttattgntagcgcgatcactaggagcgatacgagcgattatcatggcggccctacaaagggcattaaggggatagcttataccaatttcgcgcttcttgcgctaaccatatcaggcgaattgctttttgagaacgggtatgatttgtggggtagtggagctgggaaaaggctctctgtggcgtataacaaagttgcaacatggattttaaaccctgaaactttcccttatttccagcctaaccttatcggggtgcataacaacgcctatttcattattttagccaagcattattctagccctagtgcaaatgagcttttaaagcaaggcgatttacacgaagatggtttcaggctgaaactccgatcgccatgaatttttctgtatccaaggttagccttaaggatggccatgcgctttaacct

SEQ ID NO: 256 - protein, 329 aa, Helicobacter pylori
  VARIANT 208: Xaa = Any Amino Acid
MKRFVLFLLFMCVCVQAYAEQDYFFRDFKSRDLPQKLHLDKKLSQTIQPCMQLNASKHYTSTGVREPDKCTKSFKKSALMSYDLALGYLVSKNKQYGLKAIEILNAWAKELQSVDTYQSEDNINFYMPYMNMAYWFVKKAFPSPEYEDFIKRMRQYSQSALNTNHGAWGILFDVSSALALDDNALLHNSANRWQEWVFKAIDENGVIXSAITRSDTSDYHGGPTKGIKGIAYTNFALLALTISGELLFENGYDLWGSGAGKRLSVAYNKVATWILNPETFPYFQPNLIGVHNNAYFIILAKHYSSPSANELLKQGDLHEDGFRLKLRSP

SEQ ID NO: 257 - DNA, 373 bp, Helicobacter pylori
  CDS (51)...(320)
ttaacgatcgcaaaagccgatgaaagttttgatgaaatcataaaaggtgtgtgaattttttgaaaaagccaaagtattataaattcatagagggggcgaattatttgagcttggggctttctatggtggtagcgatccttatgggcgtggctataggctatgggcttaaaaaactcactcatatttcgtggcttttttggcttggggttatttggggcgtcttagcgagctttctcaatgtctataaagcttataaaaacatgcaaaaagactatgaagaactagccaaagaccctaaatacacacaaaataaaacaaaataaatccaatcaaatcccatgtgccaaatccaatgcttgcttattttactttc

SEQ ID NO: 258 - protein, 90 aa, Helicobacter pylori
VNFLKKPKYYKFIEGANYLSLGLSMVVAILMGVAIGYGLKKLTHISWLFWLGVIWGVLASFLNVYKAYKNMQKDYEELAKDPKYTQNKTK

SEQ ID NO: 259 - DNA, 643 bp, Helicobacter pylori
  CDS (51)...(590)
ttggttggttgtttttatcatagagtgtaatttaaaataaggatcatttgatgttaaacaagtttaaaaaaatcgttggcgttagtgtgttagtgggctgtttaggggttttgcaagctaaaaacagcttatttgtcttaccttatgagcaaaaagacgctctcaattctttagtttctggcattagtaacgccagagagagcgtgaaaatcgctatctatagtttcacgcacagagatattgcaagagcgattaaaagcgtagcgagtagggggattaaggtgcaaatcatttatgattatgaaagcaatcatcataacaagcaatccactattggctatctggacaaataccctaacacgaaagtgtgcttattgaaagggcttaaggctaaaaacgggaattattacggcatcatgcaccaaaaagtagcgatcattgatgataagatcgtgtttttaggctcagcgaattggagcaaaaacgcttttgaaaacaattatgaagtgcttttaaaaaccgatgacacagaaacgatcctcaaagccaagagctattaccaaaagatgttagggagttgcgttgggttttaaaagccctttagaagtggtaattataccccacataaaaggcaaagacccta

SEQ ID NO: 260 - protein, 180 aa, Helicobacter pylori
MLNKFKKIVGVSVLVGCLGVLQAKNSLFVLPYEQKDALNSLVSGISNARESVKIAIYSFTHRDIARAIKSVASRGIKVQIIYDYESNHHNKQSTIGYLDKYPNTKVCLLKGLKAKNGNYYGIMHQKVAIIDDKIVFLGSANWSKNAFENNYEVLLKTDDTETILKAKSYYQKMLGSCVGF

SEQ ID NO: 261 - DNA, 814 bp, Helicobacter pylori
  CDS (51)...(761)
tataagagagtataattcaaggcttaaaataactcaagtaaggctagtggatgaaaaaagcgctttatttaggggctgttgcgtttagcgttgcattcagcatggcatcagccaatgagccaaaaattgattttaaccctcccaattatgtagaagaaaccccctctaaagaatttatccctgaattgaacaagttagggagtttgtttgggcagggtgagcgccccttgtttgcggacaggagggcgatgaagcctaacgatttgatcacaatcattgtttctgaaaaagcgagcgcgaattattccagctctaaagattataaaagcgcttcagggggtaattccacgcccccaagactcacttataacgggctagatgaaagaaagaaaaaagaagcggagtatttagacgataagaataattacaatttcaccaaatccagcaataacacgaattttaaaggcggtggctcgcaaaaaaagagcgaagatttagagattgtgttgagcgctcgaatcattaaggtgctagaaaacgggaattatttcatctatgggaataaggaagtgctagtggatggggaaaagcaaatccttaaggtgagtggggtgatccgcccttatgatattgaaaggaataacaccatccaatccaagtttttagccgacgctaagattgaatacacgaatttagggcatttgagcgattccaataagaagaaattcgctgctgatgcgatggaaacccaaatgccttattaaaaagagcaaagcctagcatgagagcgatcgctattgttttagccagaagt

SEQ ID NO: 262 - protein, 237 aa, Helicobacter pylori
MKKALYLGAVAFSVAFSMASANEPKIDFNPPNYVEETPSKEFIPELNKLGSLFGQGERPLFADRRAMKPNDLITIIVSEKASANYSSSKDYKSASGGNSTPPRLTYNGLDERKKKEAEYLDDKNNYNFTKSSNNTNFKGGGSQKKSEDLEIVLSARIIKVLENGNYFIYGNKEVLVDGEKQILKVSGVIRPYDIERNNTIQSKFLADAKIEYTNLGHLSDSNKKKFAADAMETQMPY

SEQ ID NO: 263 - DNA, 850 bp, Helicobacter pylori
  CDS (51)...(797)
ttgggtaagattaggaattgattttaaagaaaaagaaagaaaggaatttaatgaaaaaaggtagtttggcaatcgttttaggatcgctattagcgagtggggcgttttatacggctctagctgatggaatgcctgcaaaacagcagcacaataatacgggcgagtcagtggagttgcatttccactatcctattaaaggcaagcaagagcctaaaaacagccatttagtcgttttgatcgaacctaaaatagagatcaataaagttatccctgaaagttatcaaaaagagtttgagaagtctttgtttctccagttgagtagttttttagagagaaaaggctatagcgtttcgcaatttaaagatgctagcgaaatccctcaagacatcaaagaaaaagcgttgctcgttttacgcatggatgggaatgtggctatcttggaagatattgtagaagagagcgatgcgcttagcgaagaaaaagtgatagacatgtcttcagggtatttgaacttgaattttgttgagccaaaaagtgaagatattatccatagttttggtattgatgtttcaaagattaaggctgtgattgaaagagtggaattgcggcgcaccaattctggaggttttgtccccaaaacttttgtgcataggattaaggaaaccgatcatgatcaagccattagaaaaatcatgaatcaagcctatcacaaagtgatggtgcatattaccaaagagttaagcaaaaaacacatggaacattatgaaaaagtttctagtgaaatgaaaaaacgaaagtagtttttaagaaacgaaaagcttaaaaatcattgagagctatttttaaaaaa

SEQ ID NO: 264 - protein, 249 aa, Helicobacter pylori
MKKGSLAIVLGSLLASGAFYTALADGMPAKQQHNNTGESVELHFHYPIKGKQEPKNSHLVVLIEPKIEINKVIPESYQKEFEKSLFLQLSSFLERKGYSVSQFKDASEIPQDIKEKALLVLRMDGNVAILEDIVEESDALSEEKVIDMSSGYLNLNFVEPKSEDIIHSFGIDVSKIKAVIERVELRRTNSGGFVPKTFVHRIKETDHDQAIRKIMNQAYHKVMVHITKELSKKHMEHYEKVSSEMKKRK

SEQ ID NO: 265 - DNA, 841 bp, Helicobacter pylori
  CDS (51)...(788)
tacaaataggtataatcaccaattccaatcatttaatcaaagggagttctatgaaaaatactttcaaagcgtttgcctttttaattgtatttttttcaagcgctttattagcgcaggatttaaaaatcgctgctgctgctaatcttacacgcgctttaaaagcccttgttaaagaatttcaaaaagaacaccccaaagacactgttaatattagctttaattcttcaggcaaactctacgctcaaatcattcaaaacgccccttttgatttattcatttcagcagatatgattagacctaaaaagctttatgataaaaaaataaccccttttaaagaagaagtctatgctaaaggcgtgttggttttatggagtgaagatctaaaaatggattctttagaaattcttaaaaatcctaaaatcaagcgtatcgctatggctaatcctaaactagccccttatggaaaagccagcatggaagtcttagagaatttaaaactcactcccagtcttaaatctaaaatcgtttatggcgcttctatttctcaagcccatcaatttgtcgctactaaaaacgctcaaataggctttggagcgttatccttgatggataaaaaagataaaaacctctcttatttcatcattgataaagccctttataaccctattgaacaagccttgattatcactaaaaatggggctaacaaccctttagccaaagtctttaaagattttttattcagccctaaagccagagctatttttaaagaatacggctatattgtggattaaaacgcataaaaaaggcgagcaatggatcatgagtttttgattaccatgcg

SEQ ID NO: 266 - protein, 246 aa, Helicobacter pylori
MKNTFKAFAFLIVFFSSALLAQDLKIAAAANLTRALKALVKEFQKEHPKDTVNISFNSSGKLYAQIIQNAPFDLFISADMIRPKKLYDKKITPFKEEVYAKGVLVLWSEDLKMDSLEILKNPKIKRIAMANPKLAPYGKASMEVLENLKLTPSLKSKIVYGASISQAHQFVATKNAQIGFGALSLMDKKDKNLSYFIIDKALYNPIEQALIITKNGANNPLAKVFKDFLFSPKARAIFKEYGYIVD

SEQ ID NO: 267 - DNA, 1459 bp, Helicobacter pylori
  CDS (51)...(1406)
agccattttatggcatttaaaaaagtttaaaaatgtttaaaaggaattttatgttaaggcttttgataggacttcttctaatgagttttataagcttgcaatcagcctcttggcaagaacccttaagagtgagtatagaatttgtggatttgcctaaaaaaatcattcgttttccggctcatgatttgcaagtgggggagtttggttttgtcgttactaaactttcagattatgaaatcgttaattctgaagtggtcattattgccgttgaaaatggcgtcgcaacggctaaattcagagcgtttgagtctatgaaacaaaggcatttacccactccaagaatggtcgctagaaagggtgatttagtctattttaggcaattcaacaaccaagcgtttttaatcgctcctaatgatgaactctatgagcaaatcagagcgactaacaccgatattaattttattagttctgatttgttggttacttttttgaatgggtttgacccaaaaatcgctaatttaaggaaagcgtgcaacgtttatagcgtgggggtgatttatattgtaaccaccaacacgctcaatattttaagttgtgagagttttgaaattttagaaaaaagagagctggatacaagcggcgttactaaaacttccacgccgtttttttctagggttgagggtattgatgcaggcacgctagggaaacttttttcaggcagtcagtctaaaaattacttcgcttactatgacgctttagtgaagaaagaaaaacgcaaagaagtgaggattaaaaagagggaagaaaagattgattctagagaaattaaacgagaaatcaagcaagaggccattaaagagcctaaaaaagccaatcaaggcacacaaaacgctcctactttagaagagaaaaactaccaaaaagcagagcgcaaacttgatgctaaagaagaaaggcgttatttgagagatgaaaggaaaaaagccaaagccaccaaaaaggctatggaatttgaagaaagagaaaaagagcatgatgaaagggacgaacaagagactgaaggaagaagaaaagctttagaaatggataaaggcgataaaaaagaagaaagagtcaaacccaaagaaaatgagcgagaaatcaagcaagaagccattaaagagccaagtgatggaaataacgccacccaacaaggcgaaaaacaaaacgctcctaaagagaacaacgctcaaaaagaagagaataaaccaaattctaaagaagaaaaacgccgcttgaaagaagaaaagaaaaaagccaaagccgaacaaagagcgagagaatttgaacaaagagcgagagagcatcaagaaagagatgaaaaagagcttgaagagcgaagaaaggcgctagaagcgggtaaaaaataacatgttagaccaacaacacatccaatactttaaaaacctagtagggggag

SEQ ID NO: 268 - protein, 452 aa, Helicobacter pylori
MLRLLIGLLLMSFISLQSASWQEPLRVSIEFVDLPKKIIRFPAHDLQVGEFGFVVTKLSDYEIVNSEVVIIAVENGVATAKFRAFESMKQRHLPTPRMVARKGDLVYFRQFNNQAFLIAPNDELYEQIRATNTDINFISSDLLVTFLNGFDPKIANLRKACNVYSVGVIYIVTTNTLNILSCESFEILEKRELDTSGVTKTSTPFFSRVEGIDAGTLGKLFSGSQSKNYFAYYDALVKKEKRKEVRIKKREEKIDSREIKREIKQEAIKEPKKANQGTQNAPTLEEKNYQKAERKLDAKEERRYLRDERKKAKATKKAMEFEEREKEHDERDEQETEGRRKALEMDKGDKKEERVKPKENEREIKQEAIKEPSDGNNATQQGEKQNAPKENNAQKEENKPNSKEEKRRLKEEKKKAKAEQRAREFEQRAREHQERDEKELEERRKALEAGKK

SEQ ID NO: 269 - DNA, 995 bp, Helicobacter pylori
  CDS (74)...(943)
ggcctatgacgattgtctcgcttttagaaaacactctaatcgcttttgaaaaacaacaaaggaagggattttaatgaaatttttacgctctgtttatgcattttgctccagttgggtagggacgattgttattgtgctgttggttatcttttttatcgcgcaagcctttatcattccctctcgctctatggttggcacgctctatgagggcgacatgctctttgtcaaaaagttttcttacggcatacccattcctaaaatcccatggattgagcttcctgttatgcctgattttaaaaataacggacatttgatagagggggatcgccctaagcgtggcgaagtggtggtgtttatccctccccatgaaaaaaagtcttactatgttaaaaggaattttgccattggaggcgatgaggtgttgttcactaatgagggtttttatttgcacccttttgagagcgacacggacaaaaattacatcgctaaacattaccctaacgccatgacaaaagaatttatgggtaaaatttttgttttaaacccttataaaaatgagcatccgggtatccattaccaaaaagacaatgaaaccttccacttaatggagcaattagccactcaaggcgcagaagctaatatcagcatgcaactcattcaaatggagggcgaaaaggtgttttataagaaaatcaatgacgatgaatttttcatgatcggcgacaacagagacaattctagcgactcgcgcttttgggggagtgtggcttataaaaacatcgtgggttcgccatggtttgtttatttcagtttgagtttaaaaaatagcctagaaatggatgcagaaaataaccctaaaaaacgctatctggtgcgttgggaacgcatgtttaaaagcgttggaggcttagaaaaaatcattaaaaaagaaaacgcaacgcattaaggttttttgtgcaattttttgatttctctttagaaagttttattaccac

SEQ ID NO: 270 - protein, 290 aa, Helicobacter pylori
MKFLRSVYAFCSSWVGTIVIVLLVIFFIAQAFIIPSRSMVGTLYEGDMLFVKKFSYGIPIPKIPWIELPVMPDFKNNGHLIEGDRPKRGEVVVFIPPHEKKSYYVKRNFAIGGDEVLFTNEGFYLHPFESDTDKNYIAKHYPNAMTKEFMGKIFVLNPYKNEHPGIHYQKDNETFHLMEQLATQGAEANISMQLIQMEGEKVFYKKINDDEFFMIGDNRDNSSDSRFWGSVAYKNIVGSPWFVYFSLSLKNSLEMDAENNPKKRYLVRWERMFKSVGGLEKIIKKENATH

SEQ ID NO: 271 - DNA, 2473 bp, Helicobacter pylori
  CDS (548)...(2419)
gatacaattccaaatttaaaaaacaaacgatttaattcaaatttaaggaaaaattttgattacagtggttaaacgaaacgggcgcattgagcctttggacattaccaaaatccaaaaatacactaaggacgctacggacaatttagagggcgtgagccaaagtgagctggaagtggatgcgaggttgcaattcagggacaagatcactactgaagaaatccaacaaactttgattaaaaccgctgtggataagatagatattgacacgcctaattggagttttgtcgcctcaaggctttttttgtatgatttataccataaagtaagtggttttacagggtataggcatttgaaagagtattttgaaaacgctgaagaaaagggccgcatccttaagggctttaaggaaaaatttgatctagagtttttaaatagccagatcaagcctgaaagggatttccaattcaattatttagggattaaaaccttgtatgatcgctatttgttaaaagacgctaacaacaaccctattgaattgccccaacacatgtttatgagcattgcgatgtttttagcacaaaacgaacaagaacccaataaaatcgccttagaattttatgaagttttgagcaagtttgaagcgatgtgcgcgacccccactctagcgaacgcccgcaccaccaaacaccagctcagctcatgctatattggcagcacgccggataatattgaggggatttttgacagctataaggaaatggcgctgttgtccaaatacggcggagggattggctgggatttttctttggtgcgctctattgggagttatattgatgggcataaaaatgcgagcgctggcacgatcccttttttaaaaatcgctaacgatgtggcgattgcggtggatcaattaggcacacgaaagggcgcgattgcggtgtatttggaaatttggcacattgatgtgatggagttcattgatttaaggaaaaatagcggcgatgaaaggcgaagagcgcatgatttattcccggctctttgggtgtgcgatttgtttttgaaaagggttttagaagatgcgatgtggactttatttgacccttatgagtgtaaggatttgactgagctttatgggcaggattttgaaaaacgctatttagagtatgaaaaagatcccaagatcattaaggaatacattaacgctaaagatttatggaaaaaaatcttaatgaattattttgaagccggtttgcctttcttagcctttaaagataacgccaatcggtgcaacccaaacgctcatgcaggaatcattcgatccagcaatctatgcacggagattttccaaaataccgcgcctaaccactactacatgcaaatagaatacaccgacggcaccatagagttttttgaagaaaaagagttggtaacgacagatagtaatatcactaaatgcgctaacaagctcactagcaccgatattctaaagggcaagccaatctatatcgctactaaagtcgctaaagacgggcaaacggcggtgtgcaatctggcgagcatcaatttaagcaaaatcaacactgaagaagacattaaaagggttgtgccgatcatggtcaggcttttagacaatgtgattgatttgaatttctaccctaaccgcaaagtcaaagccactaatttacaaaatagggccatagggttaggggttatgggtgaagcgcaaatgctcgcagaacaccaaatcgcttgggggtctaaagagcatttagaaaaaattgacgctttaatggagcaaatcagctaccatgcgattgacacgagcgcgaatttagcgaaagaaaaaggggtttataaggattttgaaaattcagaatggagtaaggggattttccccattgataaagccaataatgaagccttaaagctcaccgaaaaagggctttttaatcacgcttgcgattggcaaggtttgagggaaaaagtcaaagccaatggcatgcgtaatggctatttaatggcgatcgctcccacaagctccatttctattttagtaggcacaacccaaacgattgaacccatttataagaaaaaatggtttgaagaaaatttgagcgggcttattcctgttgtggtgcctaatttgaatgtagaaacctggaatttttacacatcagcctatgatattgacgctaaagatttgattaaagcagcggccgtgcgccaaaagtggattgatcaaggccaaagccttaatgtgtttttacgcatagaaaacgccagcggtaaaaccttgcatgacatctacacgctcgcttggaaattaggactcaaatccacttattatttgcgcagcgaaagccctagcatagatgaaaaaagcgtgttggatcgatcggtggagtgttttaattgccaataatataagcttaaataagctaatctttgctaaaatgagatttaaaattattta

SEQ ID NO: 272 - protein, 624 aa, Helicobacter pylori
MFMSIAMFLAQNEQEPNKIALEFYEVLSKFEAMCATPTLANARTTKHQLSSCYIGSTPDNIEGIFDSYKEMALLSKYGGGIGWDFSLVRSIGSYIDGHKNASAGTIPFLKIANDVAIAVDQLGTRKGAIAVYLEIWHIDVMEFIDLRKNSGDERRRAHDLFPALWVCDLFLKRVLEDAMWTLFDPYECKDLTELYGQDFEKRYLEYEKDPKIIKEYINAKDLWKKILMNYFEAGLPFLAFKDNANRCNPNAHAGIIRSSNLCTEIFQNTAPNHYYMQIEYTDGTIEFFEEKELVTTDSNITKCANKLTSTDILKGKPIYIATKVAKDGQTAVCNLASINLSKINTEEDIKRVVPIMVRLLDNVIDLNFYPNRKVKATNLQNRAIGLGVMGEAQMLAEHQIAWGSKEHLEKIDALMEQISYHAIDTSANLAKEKGVYKDFENSEWSKGIFPIDKANNEALKLTEKGLFNHACDWQGLREKVKANGMRNGYLMAIAPTSSISILVGTTQTIEPIYKKKWFEENLSGLIPVVVPNLNVETWNFYTSAYDIDAKDLIKAAAVRQKWIDQGQSLNVFLRIENASGKTLHDIYTLAWKLGLKSTYYLRSESPSIDEKSVLDRSVECFNCQ

SEQ ID NO: 273 - DNA, 1440 bp, Helicobacter pylori
  CDS (56)...(1390)
gcaaaattctagccttaaatctttgatgaaacgaagtcaaattataagataaggcatgttaaaattccctaaaatgagtttaaggattttaatgctttctgtcatcatactggccgctggtaaaggcactcgcatgcgttctagcctgcctaaaactttacacaccatttgtggggagcctatgttgttttacattttagaaacggctttttcaatcagcgatgatgtgcatcttatcttacaccaccaacaagaacgcattaaagaagcggtgttggagcgttttaagggcgtcatttttcacactcaaattgtggaaaaatattcagggacaggtggggctatcatgcaaaaagataaaacgcctatttctacgaaacatgagcgggttttgattttgaatgcggacatgcctttaatcactaaagacgctctcgcccccttattagaaagcaagaataacgctataggcttactccatttagctgaccctaaaggttatgggcgcgttgttttagaaaaccatcaggttaaaaagattgtagaagaaaaggacgctaatgatgaagaaaaagaaattaaaagcgtgaatgctggcgtgtatgggtttgaaagggattttttagaaaaatacttacccaagctccatgaccaaaacgcccaaaaagaatactacctcacggatttaatcgctctagggatcaatgaaaacgaaacaattgacgctattttcttaaaagaagagtgttttttaggggtgaatagccaaacagaaagggcgaaagctgaagaaatcatgctagaaagactgcgcaaaaacgccatggacttgggggtagtgatgcaattgcctaatagcatttatttagaaaaaggcgtgagttttaagggggagtgcgttttagagcaaggggtgcgtttgattgggaattgtttgatagaaaacgcgcatattaaggcttatagcgtgatagaagagagccagattgttaatagcagtgtggggccgtttgcccatgcgcgccctaaaagcgtgatttgtaatagccatgtggggaattttgtagagactaaaaacgctaaacttcaaggcactaaagcagggcatttgagctatttaggggattgtgagatagggaaaaacacaaatgtaggggctggcgtgatcacttgcaattacgatggtaaaaagaaacaccaaacaatcatcggtgaaaatgtctttatagggagcgatagccagctagtcgcccccataaatatcggctctaatgtcttaatcggcagcggcaccactatcactaaagacattcctagcggttcgttgagcctttcacgcgcccctcaaaccaacattgaaaacgggtattttaagttttttaagaaaccttaatttgtttgaataatgaaaaatcctaaaatattaatcatttactttaa

SEQ ID NO: 274 - protein, 445 aa, Helicobacter pylori
MLKFPKMSLRILMLSVIILAAGKGTRMRSSLPKTLHTICGEPMLFYILETAFSISDDVHLILHHQQERIKEAVLERFKGVIFHTQIVEKYSGTGGAIMQKDKTPISTKHERVLILNADMPLITKDALAPLLESKNNAIGLLHLADPKGYGRVVLENHQVKKIVEEKDANDEEKEIKSVNAGVYGFERDFLEKYLPKLHDQNAQKEYYLTDLIALGINENETIDAIFLKEECFLGVNSQTERAKAEEIMLERLRKNAMDLGVVMQLPNSIYLEKGVSFKGECVLEQGVRLIGNCLIENAHIKAYSVIEESQIVNSSVGPFAHARPKSVICNSHVGNFVETKNAKLQGTKAGHLSYLGDCEIGKNTNVGAGVITCNYDGKKKHQTIIGENVFIGSDSQLVAPINIGSNVLIGSGTTITKDIPSGSLSLSRAPQTNIENGYFKFFKKP

SEQ ID NO: 275 - DNA, 771 bp, Helicobacter pylori
  CDS (227)...(715)
  misc_feature 57: n = A,T,C or G
gcaaagataaaaaacaaacgggttttggtgaaattttctggggaagcgttagctggnggacaaccagtttgggattgacattcatgtgttagatcacatcgctaaagagatcaaaagtttagtggaaaacgatattgaagtgggtattgtgattggtggaggcaatattattaggggggttagcgcggctcaaggggggattattaggcgcaccagtggggattatatgggcatgttagccaccgtgattaatgcggtagcgatgcaagaagctttagagcatatcggcttagacacaagggtgcagagcgcgattgaaatcaaagagatttgtgaaagttacatttacagaaaagcgatcaggcatttagaaaagggtagggtggtgatttttggcgcaggcacgggaaacccgtttttcactacggatacggctgccactttaagagcgattgaaattggatcggatttaatcattaaagcgactaaagtggatggcatttacgacaaagatcctaacaagtttaaagacgctaaaaaattagacactttaagctataacgatgccttgataggggatattgaagtgatggacgataccgctatttctttagctaaagacaataagctccccattgtggtgtgtaacatgttcaaaaaagggaatttattgcaagtgatcaagcaccaacaaggcgtattttctatggtaaaataagccctttaacattggatagaactcaaaataaaaggatcagtttgaaaaaagag

SEQ ID NO: 276 - protein, 163 aa, Helicobacter pylori
MGMLATVINAVAMQEALEHIGLDTRVQSAIEIKEICESYIYRKAIRHLEKGRVVIFGAGTGNPFFTTDTAATLRAIEIGSDLIIKATKVDGIYDKDPNKFKDAKKLDTLSYNDALIGDIEVMDDTAISLAKDNKLPIVVCNMFKKGNLLQVIKHQQGVFSMVK

SEQ ID NO: 277 - DNA, 659 bp, Helicobacter pylori
  CDS (56)...(607)
tcatgtaaaataaagggttttattaaagatgagagattgttttaaggtttgaataatgagagcttttttaaagattttaatggttttgatttttatgagcgttgcttatgctaaaaatccttcaacgctttctaaagaagaagaggttttgcagcatttgcaaagttttagcgcgcatttcaagcaggttttaaaaaatgaaaaacctttagtttattacggggttttaaaggctaaagcccctaattgggctttatgggtttatgaaaagcctttaaaaaaagaaatttacatgaacgataaagaagtggtaatttatgagcctaatttgtttcaagcgaccatcacgcccttaaaagacaagacggattttttcaccattctcaagcgtttaaaaaagcaagatgacggatcttttaaaacgactatcaacaaaaccacttatcgtttggtttttaaagacggcaagcctttttcattggaatttaaagatggaatgaacaatcttgtaacgatcactttttctcaagcagaaatcaaccccaccattgctaatgaaatctttgtttttaagcctaaagatgaaaacattgatattgtgcgccaatgatttttaatgattcattgcatcttgttagcaaaagttagctaaaatagac

SEQ ID NO: 278 - protein, 184 aa, Helicobacter pylori
MRAFLKILMVLIFMSVAYAKNPSTLSKEEEVLQHLQSFSAHFKQVLKNEKPLVYYGVLKAKAPNWALWVYEKPLKKEIYMNDKEVVIYEPNLFQATITPLKDKTDFFTILKRLKKQDDGSFKTTINKTTYRLVFKDGKPFSLEFKDGMNNLVTITFSQAEINPTIANEIFVFKPKDENIDIVRQ

SEQ ID NO: 279 - DNA, 3035 bp, Helicobacter pylori
  CDS (729)...(2981)
gaaacgatcgcagaaagcaatgaaagcacggtagtagcggaatttcatagcagtaatgaaaaaaaagcgcttatgagagcgaagcagagctagaaagggcgtttattaagcttttagaaaaacaaggctatgaatttaaaaaaatccacaaagaagaagaattaaaagacaatttaaaagagcagttagaaaagcttaatgatcattctttcacgcctaaagaatgggacactctttattctcaattcatcgctaataaaaacgatgactataaggctaaaacgaaaaagatccaagaagatccgatttttaatctcacgctagagaacgggaaaaccaaaaacattaaaatcattgataagaaaaatatccatagaaacgccttgcaagtgatccaccaatacagcaataaaggggggaagtatcaaaaccgctatgatgtgagtatccttgtgaatggcttgcctttagtgcatgtggaattgaaaaaaagaggcgtggcgatcagggaggcgttcaaccagatcaagcgctataaaagggatagttttagcgctgaagacgggctttttgattttgtgcagatttttgtcatcagtaacggcacgagctctaaatactattcaaacaccacaagaatagcccagctggaaaaaaaccataaagccgatacttttgaattcacgaattattgggcggatagcaagaatcacaatattgaggatttaatggattttgctaaggcgttttttgcaaagcgcagccttttgaacgttttaacgtgctattgcgttttcacaagcgaagaggttttattggtgatgcggccttatcaaatcgtggcggccgaaaggattttggaaaagatcaaaaccgcgcaaaatagtaaaacgaaaaatcaaagcaaaggctatatctggcacacgacagggagcggtaaaaccctaacgagctttaaaagcgcaacgttggctaaagaattagagagcgtttcaaaagtcttgttcgtggtggacaggaaggatttggactatcaaaccatgaaagaatacgataaattccaaaaagattgcgctaattccaacacaagcactaagattttaaaagaacagcttgaagattctaacgctaaaatcattatcaccacgatccaaaaattagacaaattcgttaaatcccataaagggcatgcgatttttaatgaagaagttgtgatgatttttgatgaatgccacaggagtcagttaggctctatgcatcaagccatcactaaagcgtttaaaaaataccacctttttggctttactggcacgcccatttttgcagctaattgcgataaaaacaaccctttaggcacgacagagcaaaagtttgggaaatgcctccaccaatacaccattattgatgcgatcagggataaaaacgttttgccctttagagtggaataccacaacaccattaaagctaaagaggacattaaggataataaggttagagcggttgatgaaaaaaacgcccttttggatactaggaggatcaaagaaatcactaaatgcattttagagcgtttcaatcaagccactaaaaataaaaaattcaattccattctggcatgctctagcatagaagcgctgaaaaaatactaccaagcctttaaagaagaaaaacacgatcttaaaatcgctgccatttttagctatagcgctaatgaggaaattgacacgctagaagatgaaaacaatgaaagcgcttgccggctagacaaaagctcaagggattttttagagggcgcgattgcggattataatgggatgtttggcgtttcttttgacacttcggatcaaaaattccaaagttattacaaggatctttctcaaaaaatgaaagagcgtaaaatcgatcttttaatggtggtgaacatgtttttgaccgggtttgacgctacaaggctcaacaccctttgggtggataaaaatctcaaataccatgggctaattcaagctttttcacgcgcaaaccgcattttagatagcgttaaaacgcatgggaatatcgtgtgttttagggatttagaacaggatttgaatgacgctctcatgctttttggcaacaaggacgctcaatctattgcgctgttaagaaaatatgaagattatttgaaaggctacacggataacaacaaagaatacgagggctatgagggtttgattaaaaggcttttaaccgaattcccattaaaagagccaatcgtttcagaaagccagaaaaaggattttattaagctttttggcaagattttgaaattagaaaatattttaaacagctttgaaaatttcaaaaaagacgattacatcaatcccagggattttcaagactatcaaagcaaataccttgatttttacgatgcaatgagatcagaaaaagggaaggataaagaagagattaatgatgatttgatttttgaaattgaactcatcaaacaagtggaagtcaatattgactatattttgaatttgattgaagagttcgctaaagagcatggggtggaaatccaaggcgttaaaaccaaaatagagccaatcatcaactccagcatagagttaaggaataaaaaagatttgatcatggatttcattgacaaatacaacaaagaccaagaagtccatgcgcattttcaagattatatccaccaaaaaagagaagaggaattccaaaatatcatagaagaaaaccgcttgaatgaagaaaaagcctattcgttcatgcagcatgcctttaaagggggcgaaatcagttttagtgggacggaattccctaaaatcattgaagaaaaaccctccatgtttggtaaaaattcgcgctatcaagaggtgaaagaaaaagtcgctgcaagcctttctcgttttttccaccgcttttgtgatctcactagcgctatatttaagaaaaatgaggttaaaaaagatgaggttaatgaaaaatagttcatgaacgcttttgcattaaggctcaaaaaaagcgccgtttaatggatt

SEQ ID NO: 280 - protein, 751 aa, Helicobacter pylori
MDFAKAFFAKRSLLNVLTCYCVFTSEEVLLVMRPYQIVAAERILEKIKTAQNSKTKNQSKGYIWHTTGSGKTLTSFKSATLAKELESVSKVLFVVDRKDLDYQTMKEYDKFQKDCANSNTSTKILKEQLEDSNAKIIITTIQKLDKFVKSHKGHAIFNEEVVMIFDECHRSQLGSMHQAITKAFKKYHLFGFTGTPIFAANCDKNNPLGTTEQKFGKCLHQYTIIDAIRDKNVLPFRVEYHNTIKAKEDIKDNKVRAVDEKNALLDTRRIKEITKCILERFNQATKNKKFNSILACSSIEALKKYYQAFKEEKHDLKIAAIFSYSANEEIDTLEDENNESACRLDKSSRDFLEGAIADYNGMFGVSFDTSDQKFQSYYKDLSQKMKERKIDLLMVVNMFLTGFDATRLNTLWVDKNLKYHGLIQAFSRANRILDSVKTHGNIVCFRDLEQDLNDALMLFGNKDAQSIALLRKYEDYLKGYTDNNKEYEGYEGLIKRLLTEFPLKEPIVSESQKKDFIKLFGKILKLENILNSFENFKKDDYINPRDFQDYQSKYLDFYDAMRSEKGKDKEEINDDLIFEIELIKQVEVNIDYILNLIEEFAKEHGVEIQGVKTKIEPIINSSIELRNKKDLIMDFIDKYNKDQEVHAHFQDYIHQKREEEFQNIIEENRLNEEKAYSFMQHAFKGGEISFSGTEFPKIIEEKPSMFGKNSRYQEVKEKVAASLSRFFHRFCDLTSAIFKKNEVKKDEVNEK

SEQ ID NO: 281 - DNA, 850 bp, Helicobacter pylori
  CDS (68)...(799)
accactattgtagaaaaataacaagagggtttgcaaaaactctcattaaaaacaaggagcaaaaaagatgaaaaaggcgggctttctttttttagcggtaatggctatcgttgttatgagtttaaacgctaaagatccgaatgtgttgcgtaagattgtttttgagaaatgtctgcctaattatgagaaaaatcagaatccttcgccatgcatagaagtcaaacccgatgccggctatgtggttttaaaagatattaacggcccgttgcaatatttgttgatgccaacaactcacattagcggtattgaaagccctttgttacttgatccttctacgcctaactttttttatttatcctggcaagcgcgtgattttatgagtaaaaaatacggccaacccattcctgattatgcgatttctttgacgattaactctagcaaagggcgatcgcaaaaccattttcatatccatatctcttgcattagtcttgaagcacgcaaacagctggataataacctaaaaaaaatcaacagccgttggtcgccattaccgggcggtttgaatgggcataaatacttggcgcgtcgggtaacagagagcgagttagtgcaaaaaagcccgtttgtcatgcttaataaagaagtgcctaatgcgtacaaacgcatgggggactatggcttagcggtggtgcaacaaagcgataactcctttgtcttattagcgacacaatttaacccattgactttaaatcgcgcttcagccgaagagattcaagatcatgaatgcgcgattttgcactaaagcgagttagattcttaagcttgagcgataacctttaaaaagcgttat

SEQ ID NO: 282 - protein, 244 aa, Helicobacter pylori
MKKAGFLFLAVMAIVVMSLNAKDPNVLRKIVFEKCLPNYEKNQNPSPCIEVKPDAGYVVLKDINGPLQYLLMPTTHISGIESPLLLDPSTPNFFYLSWQARDFMSKKYGQPIPDYAISLTINSSKGRSQNHFHIHISCISLEARKQLDNNLKKINSRWSPLPGGLNGHKYLARRVTESELVQKSPFVMLNKEVPNAYKRMGDYGLAVVQQSDNSFVLLATQFNPLTLNRASAEEIQDHECAILH

SEQ ID NO: 283 - DNA, 981 bp, Helicobacter pylori
  CDS (57)...(929)
gtcctattttttcattcattcaacgaatttaaaaattacaataaagagttatagttatgaaacgaagggattttattaaaacgactactttaggcgctacaggtgctgttttaggagcacagattttgcaggcagaagaaagtaaagggagtgttgcaaaatataaaatagaagctcaatacagcattgattttgattctgcagaacacacttcacttttcattcccatgccgagtgttgtagcgagcaatgtgcatttacaaggcaatcatgctagctataaaagcatgctcaattttggagtgccttatttgcaagtggattttttaaaaagcactcaaaaaaagcaagtccatttgtcttatgagatcgctagctatcaattgaatgagcgtttgtttgaaacgagcgattttgtagcaatggggcgttatgaaagagacgatgcgagcgtggctaacattgccaaccagcttaagggaacaacccctaaagaaagcgttcgcaatttttatgcgttcatcaagcatgagatgcctaagagacagaaggctttagagggtaaagaaaatttacctaagcgtgagagtttgccctggtttgcaaccatttcaaaagagagcatgtttgtgtccttatgccatgcgtgcgggattaaaagcgctgaagtgcaaggcttgaaactgggtcaaaacagcgtggtgaaaaacgctcctagagtggaagtgtatttgaaagattcatttctagcgtttgattttcaaaataatcacaaggaagtttttatcccgttgaatcgtcataaagacatgcagttagattctgccttattggcgacttttggcgatgcttttgcccttgtggatggtagggatttaggcaattacgagagcaaactttttgaaaaaagagtgtcctatacgattgtctaaaggcatgaaatctaggaatattccttgatagcgggctttcctttttagg

SEQ ID NO: 284 - protein, 291 aa, Helicobacter pylori
MKRRDFIKTTTLGATGAVLGAQILQAEESKGSVAKYKIEAQYSIDFDSAEHTSLFIPMPSVVASNVHLQGNHASYKSMLNFGVPYLQVDFLKSTQKKQVHLSYEIASYQLNERLFETSDFVAMGRYERDDASVANIANQLKGTTPKESVRNFYAFIKHEMPKRQKALEGKENLPKRESLPWFATISKESMFVSLCHACGIKSAEVQGLKLGQNSVVKNAPRVEVYLKDSFLAFDFQNNHKEVFIPLNRHKDMQLDSALLATFGDAFALVDGRDLGNYESKLFEKRVSYTIV

SEQ ID NO: 285 - DNA, 686 bp, Helicobacter pylori
  CDS (82)...(633)
tgtgattaaacaaaatcaaaaactttttaactataatcaaacctaaattaaagttcaaggagtggcattttgtttaaaagaatggttttaatcgctcttttaggggtgttttcaagcgtttcattaagcgctaagagtcttttaagagatgatgggattttagtctctgatttaaagggcatgaaatcagaactatctgatgctcctgcttgggtttttgaagacgctaaagccccctacgaagaaatgggcgtggcgtatatccctgttaataataaatatttagggattgagcaagcgaccttaaacgctaaattgagtctgatcgtggtttttcatgaaatcatgatgaagtataaaaaacgcttcatggagcaattccatgagtccgagcagacgactacgaatatcagttacgctatctataattatctagcgactaagatccaggtatccaacacctacacgaatttaaaatcggaggtggcggtggtgaaaatcaagctagtgggttgtcagattgagcaaatcaaaaggtatttaaaagcgagcgttgaaaaccttaacgataatgaaatcgcttacatcgctaaggtcgctcaaaaagaatttggtagcgtttgtgcgttaaggtagttttatagcattctagcgagcatgtttaaggcatgctctacgcttttatt

SEQ ID NO: 286 - protein, 184 aa, Helicobacter pylori
MVLIALLGVFSSVSLSAKSLLRDDGILVSDLKGMKSELSDAPAWVFEDAKAPYEEMGVAYIPVNNKYLGIEQATLNAKLSLIVVFHEIMMKYKKRFMEQFHESEQTTTNISYAIYNYLATKIQVSNTYTNLKSEVAVVKIKLVGCQIEQIKRYLKASVENLNDNEIAYIAKVAQKEFGSVCALR

SEQ ID NO: 287 - DNA, 310 bp, Helicobacter pylori
  CDS (112)...(252)
atgcctgccatttcatagcctaaattttctttagagccgaattgataagcggcttttaagacttctttttgcttagcgttaaaatctttaatattgtcgcaattggtcatcatgactttagtaacgggcgatttgggcttgtttttaacccctttagcgggcttaggctctgttttagtggggctttctgttgcggctaaacttaaagatgcacttaaggctgtgcctagccataaggctttaaagatggtgtgagtgagtggggttaaatgtttcaaaacgcctaccttttgtattaagaaataaacta

SEQ ID NO: 288 - protein, 47 aa, Helicobacter pylori
MTLVTGDLGLFLTPLAGLGSVLVGLSVAAKLKDALKAVPSHKALKMV

SEQ ID NO: 289 - DNA, 631 bp, Helicobacter pylori
  CDS (145)...(579)
  misc_feature 48: n = A,T,C or G
gcgttcaatagaatgctttagttaggaagctccttgctttagcaaggngtggtttcactgaaagagagtaagaaatttgaagaaagggtttatctttttttagatgaatttgtgcgttttggtaaattgccttttttattagaaatgccagcattaagtaggagctatggtgtggttttaatttttatcacgcaatccaacgctcttattgaaaaatattacggcagagaagatgcaagaattgttaatagcaccgtggcttacaaaataattttcaaaatggatgatttagaatacgctaaacaggtgagcgaagaagtcggtaagatgactagaaaaacacgaagccactctacagaaaaaggacaactcattaccggagggacttctagtataggtaaagaggcgtgggacttattgagcgcgcaagatattatgaatattgataaagatgaagtgatcgttttagtaagcggtcataaggctaaacccttaaaattaaaagcgaattattatttcaaaaacaaagaattactctctcgtattaactgggaagtcaagcccaatgaagaagtgttttgatggattaaaaaagtttgcatgagtattttttaattgcttttttaaaaat

SEQ ID NO: 290 - protein, 145 aa, Helicobacter pylori
MPALSRSYGVVLIFITQSNALIEKYYGREDARIVNSTVAYKIIFKMDDLEYAKQVSEEVGKMTRKTRSHSTEKGQLITGGTSSIGKEAWDLLSAQDIMNIDKDEVIVLVSGHKAKPLKLKANYYFKNKELLSRINWEVKPNEEVF

SEQ ID NO: 291 - DNA, 290 bp, Helicobacter pylori
  CDS (106)...(237)
taagggcttacgcataaaatcgcatccgcgccgattttttgagcgaactttgctaaagaaagggactcgctcgtggcgttactgcccacgccggctaacactttcatgcgcgaatttgagggcgttttagtgtttttgcaagtttctatggcgatttcaatgcaacgcatgtgctctttgtgggtgagcgtggcggattctcctgtcgtgccaacaggcacgcatgcgtccatgccctgaaaaatttggcgcttgatcaaggtttcataagcggcctcatcaacgctcaa

SEQ ID NO: 292 - protein, 44 aa, Helicobacter pylori
MREFEGVLVFLQVSMAISMQRMCSLWVSVADSPVVPTGTHASMP

SEQ ID NO: 293 - DNA, 421 bp, Helicobacter pylori
  CDS (58)...(369)
aaagaaggtttgaaaagcttttttaaaaggcttttgaagtatttggggtaggcttgaatgaaagtgcaaaattttatccatttttctgttgtggtagggttttttttggggttagtgttttcggtgttgaaattcaatgagccagagagcattttattatggacggtgttatccacgcttggggggtacttgattgcgttgttgtttgcgtctatttttatcgcttgcacggatttggatatttgtctttttgacaaaaaaggcactgaagagagtttgcttcgtttcaaccatgagtttaaaaacagagaaaaagaagtggctagtattttagaatacattagaagttatgattttgatgatggaaaatagaatgcccaaaggaattcaaaaaactgaaacaagcgaaaaaaatatagaa

SEQ ID NO: 294 - protein, 104 aa, Helicobacter pylori
MKVQNFIHFSVVVGFFLGLVFSVLKFNEPESILLWTVLSTLGGYLIALLFASIFIACTDLDICLFDKKGTEESLLRFNHEFKNREKEVASILEYIRSYDFDDGK

SEQ ID NO: 295 - DNA, 670 bp, Helicobacter pylori
  CDS (51)...(617)
gtttagaaaagcgtttgaacgctataaaaaatgcagagtggctttaaggcatgaaaaagattgcattttttatttttgtcattttgttttcggtagggatttatttaatttggcatgttttattggaaaaagccctagaattgaaattagcaacctcagctaatgatttgcttttaaaattgttggcaattcttggcgttttttcaatgttagtgctttttcaaggcattatttcttcgtataagaagcgccaactcaaacgcattttacaaaaaatagacgccatgaacggctttgaatttgaagaatattccaaaatctttttcacttcaaagggttttgaagtgagcatcacgcaaaaaagcggcgattatggagcggatttgattatagaaaaagacggcatcaagtgggcggttcaagtcaaacgctactcgcataaagtttcgcccaaagccattcaagaggtggtctcttctaaagcttattacgcttgcgaaaaagcttgcgtgatcaccaacagctatttcacgcaagccgctcaaaaactggctcaagctaacgaagtgctcttgattgacagagacgaatgggtcaggtttttgaacgaaaagagatgaaccgatcccatcagatcgtttgttctcaagttcttttaaaattttgtcgt

SEQ ID NO: 296 - protein, 189 aa, Helicobacter pylori
MKKIAFFIFVILFSVGIYLIWHVLLEKALELKLATSANDLLLKLLAILGVFSMLVLFQGIISSYKKRQLKRILQKIDAMNGFEFEEYSKIFFTSKGFEVSITQKSGDYGADLIIEKDGIKWAVQVKRYSHKVSPKAIQEVVSSKAYYACEKACVITNSYFTQAAQKLAQANEVLLIDRDEWVRFLNEKR

SEQ ID NO: 297 - DNA, 600 bp, Helicobacter pylori
  CDS (125)...(538)
caaagagtgggataaaatcacagaaatttgtaagagagcgctagctttaagataacaaaaagatcatggcattttgtatttgcttaataacactataataaaatttttaataaggagatacatcatgttagaaaatgtcaaaaagtccttttttagggttttgtgcttgggtgcgttgtgtttaggggggctaatggcagagcaagaccctaaagagcttgtgggtttgggggcaaagagctacaaagagaaagatttcactcaagcgaagaaatattttgagaaagcgtgcgatttgaaagaaaatagcgggtgttttaatttaggggtgctttattatcaagggcaaggggtggaaaagaacttgaaaaaagccgcctccttttacgctaaagcttgcgatttgaattacagcaatgggtgtcatttgctagggaatttatattacagcgggcaaggcgtgtcccaaaacaccaataaagccctacaatactactctaaagcgtgcgatttgaaatacgctgaagggtgcgcgacttaggggggatttatcatgatggtaaagtggtaactagggattttaaaaaagcggtggaatat

SEQ ID NO: 298 - protein, 138 aa, Helicobacter pylori
MLENVKKSFFRVLCLGALCLGGLMAEQDPKELVGLGAKSYKEKDFTQAKKYFEKACDLKENSGCFNLGVLYYQGQGVEKNLKKAASFYAKACDLNYSNGCHLLGNLYYSGQGVSQNTNKALQYYSKACDLKYAEGCAT

SEQ ID NO: 299 - DNA, 879 bp, Helicobacter pylori
  CDS (59)...(826)
ttttaagattggtagccattggcattatgtttgatcttattaaagcagaggagtaacaatgggatacgcaagcaaattagccttgaagatttgtttggcaagtttatgtttatttagcgctcttggtgcagaacaccttgaacaaaaaaggaactatatttataamggggaggaagcctataataataaggaatatgagcgggcggcttctttttataagagcgcgattaaaaatggcgagccgcttgcttatgttcttttagggatcatgtatgaaaatggtaggggtgtgcctaaagatgaaaagaaagcggctgaatattttcaaaaagcggttgataacgatatacctagagggtataacaatttaggcgtgatgtataaagagggtagaggtgtgcctaaagatgaaaagaaagccgtggagtattttagaatagctaccgagaagggctatactaacgcctatataaacttaggcatcatgtatatggagggtaggggagttccaagcaactatgtgaaagcgacagagtgctttagaaaagcgatgcataagggtaatgtagaagcttatatccttttaggggatatttattatagtgggaatgatcaattgggtattgagccagacaaagataaggcgattgtctattataaaatggcggctgatatgagctcttctagagcttatgaagggttagcagagtcttatcagtatgggttaggcgtggaaaaagataagaaaaaggctgaagaatacatgcaaaaagcatgcgattttgacattgataaaaattgtaagaaaaagaacacttcaagccgataactctcaaacttgggcttgattaggatttttgttttattttaagtagcatg

SEQ ID NO: 300 - protein, 256 aa, Helicobacter pylori
  VARIANT 36: Xaa = Any Amino Acid
MGYASKLALKICLASLCLFSALGAEHLEQKRNYIYXGEEAYNNKEYERAASFYKSAIKNGEPLAYVLLGIMYENGRGVPKDEKKAAEYFQKAVDNDIPRGYNNLGVMYKEGRGVPKDEKKAVEYFRIATEKGYTNAYINLGIMYMEGRGVPSNYVKATECFRKAMHKGNVEAYILLGDIYYSGNDQLGIEPDKDKAIVYYKMAADMSSSRAYEGLAESYQYGLGVEKDKKKAEEYMQKACDFDIDKNCKKKNTSSR

SEQ ID NO: 301 - DNA, 319 bp, Helicobacter pylori
  CDS (66)...(269)
tgggggttgtggttgctcatgttcgcatgggtagtaaggtataggagtatttaaaaggcaaggtcatgaatagttctaatctcaaaaattggctattccctaccatttgcttttttttattttgttatattttaatttttttaatgttctttatgtttaaaagtttgcaatcgcaatcgtttggctctgtggcagaaaccggaaaaaaacccatcaccaccaccaagaaatttggtaaggaattgcaaaaacagatttcaaaaatccattaactttttttcttttttgccgatacttgctgtaatggaatgaatatcaa

SEQ ID NO: 302 - protein, 68 aa, Helicobacter pylori
MNSSNLKNWLFPTICFFLFCYILIFLMFFMFKSLQSQSFGSVAETGKKPITTTKKFGKELQKQISKIH

SEQ ID NO: 303 - DNA, 1112 bp, Helicobacter pylori
  CDS (66)...(1058)
aaaaactagagagtgttataaagaaaacagaagagtggatgtcaaattaatgaagtaattctaggatgaaaaggcttttttttatcccttttatcgctcccttttttctcaatggggagccttcagcgtttgatttgcaaagtggggctaccaaaaaagaactcaagcagttgcaaatcaatagtaagaatttttctaatattttgaccaaaatccattcgcaagtagaggctaacactcaagctcaagagggtttgagaagcgtttatgaggggcaggctaataagattaaagatctcaataacgctatcctttcccaagaagaatccttacgagccttaaaagcttcgcaagaagtgcaggctaacacgcttaagcagcaatcgcaaactttagaggatttgaggaatgagattcacgctaaccagcaagctatccagcagttagacaagcaaaataaagagatgagtgaattattgaccaagttaagccaggatttggtttcacaaatcgccttaatccaaaaagctctcaaagaacaagaggaaaaagctgaaaagccgctcaaatcaaacgctccggctaataaaaccccctctttgaaagccgaatccccaaaaaatcaagagggaaaaactcaagaaaaggcgaaaattgagtttgataaagacttgtctaagcaaaaagagatctttcaagaagctctgtctttttttaaaaataaatcctatgcagaagccaaagagcgtttgttgtggttagaagccaatagttacagactttattatgtgcgttatgttcttggagaagtggcttatggggaaaagagatacagagaagcgatcaagtattacaaagagagcgctcttttaaacaaaaaagcgtcttacatgcctgtgcttttgtggcatacggcatggtcgtttaaaaaaatcaaagacgatcaaaactattataaatttttaaacactttgcaacacttgtatccttcaagcgaacaagctaaaatggcgcaaaaaatcttagaaaacaaggagaaacaccaccatgcaaaaccatgatttagagtcaatcaaacaagccgctttgattgaatatgaagtgagagaaca

SEQ ID NO: 304 - protein, 331 aa, Helicobacter pylori
MKRLFFIPFIAPFFLNGEPSAFDLQSGATKKELKQLQINSKNFSNILTKIHSQVEANTQAQEGLRSVYEGQANKIKDLNNAILSQEESLRALKASQEVQANTLKQQSQTLEDLRNEIHANQQAIQQLDKQNKEMSELLTKLSQDLVSQIALIQKALKEQEEKAEKPLKSNAPANKTPSLKAESPKNQEGKTQEKAKIEFDKDLSKQKEIFQEALSFFKNKSYAEAKERLLWLEANSYRLYYVRYVLGEVAYGEKRYREAIKYYKESALLNKKASYMPVLLWHTAWSFKKIKDDQNYYKFLNTLQHLYPSSEQAKMAQKILENKEKHHHAKP

SEQ ID NO: 305 - DNA, 531 bp, Helicobacter pylori
  CDS (52)...(483)
aacaaatgcgagtttcaaatattttgtaggattttaggaaagaaataggttatgaatatatcggttaacccctatttaatggcggtcgtttttgtggtgtttgtgttattgttatgggcgatgaatgtttgggtgtataggcctttgttggcttttatggataacagacaggcagagataaaggatagcttggctaaaatcaaaacggataatgcccaaagtgtggagattggccatcaaattgaggctcttcttaaagaagcggctgaaaaacgcagagaaataatagcagaagcgattcaaaaagccacagagtcctatgacgctgtgatcaagcaaaaagagaacgaactcaatcaagagtttgaagcgtttgcgaagcaattacaaaatgaaaagcaagcgctaaaagagcagttgcaagcgcaaatgccggtatttgaagacgagttaaacaagcgtgtggctatgggtttagggagttgatgaatgtttgtagttaaaatggtgttagggtttttgatcctttta

SEQ ID NO: 306 - protein, 144 aa, Helicobacter pylori
MNISVNPYLMAVVFVVFVLLLWAMNVWVYRPLLAFMDNRQAEIKDSLAKIKTDNAQSVEIGHQIEALLKEAAEKRREIIAEAIQKATESYDAVIKQKENELNQEFEAFAKQLQNEKQALKEQLQAQMPVFEDELNKRVAMGLGS

SEQ ID NO: 307 - DNA, 5832 bp, Helicobacter pylori
  CDS (387)...(5777)
aagcttgatatggagcattttgatcgcttgaccatgctcaatagagaagaattgttgcgcgttactcgctcctttctcaagcgattttagaagagcctttcagccataacggcaaggattataaagaaggcgatcaaatccctaaagaagaaatcgcttcaatcaaccgcttcactttggctagtttggtcaaaaagtattctaaagaagtgcaaaaccactatgaaatcactaaaaacaatttcttagagcaaaagaaagttttgggcgaagagcatgaagaaaagctttctattttagaaaaagatgatattttgcctaatggcgtgatcaaaaaagtcaagctctatatcgctacaaaacgaaagcttaaagtgggcgataaaatggcaggaaggcatgggaataaagggattgtgtctaatatcgtgccggttgcggatatgccttataccgctgatggcgagcctgtagatattgttttaaaccctttaggcgtgccaagccgcatgaatatcgggcagattttagaaatgcatttaggcttagtggggaaagaatttgggaagcaaatcgctcgcatgctagaggataaaaccaaagattttgccaaagaattgcgtgctaaaatgctagaaawcgctaacgctattaatgaaaaagaccccttgacaatccatgcgcttgagaattgttctgatgaagagcttttggaatacgcaaaagattggagcaagggcgttaagatggctatccctgtgtttgaaggcatctcgcaagaaaaattttataagctatttgaattagctaagatcgctatggatggcaaaatggatctgtatgacggacgcacaggcgagaaaatgagggagcgcgtgaatgtgggctacatgtatatgatcaaactccaccatttagtggatgaaaaagtccatgccagaagcacaggcccttatagcttagtaacgcaccagcccgtggggggtaaagcgctctttgggggtcaaaggtttggggaaatggaagtgtgggccttggaagcttatggcgcagcgcacactctaaaagaaatgctcaccattaaatccgatgatattagaggcagagagaacgcttatagggctatcgctaaaggtgagcaagtgggcgagagtgaaatccctgagactttctatgttttgactaaagaattgcaatcgctcgctttggatattaatatttttggggacgatgtggatgaggatggagcacctaaacccattgtcattaaagaagatgacaggcctaaagactttagctctttccagctcacactagctagccctgaaaaaatccattcttggagttatggggaagttaaaaagccagaaacgatcaattatcgcaccctaaaacctgaacgagacggcttgttttgcatgaaaatctttggccccactaaagattatgaatgcttgtgcggcaaatacaaaaagcctcgcttcaaagacattggcacatgcgaaaaatgcggcgtggcgatcacgcactccaaagtcaggcgttttagaatggggcatattgaattggccactcctgtagcgcatatctggtatgttaattccttgcctagccgtatcggcacgcttttaggcgttaagatgaaagacttagagcgcgtgttgtattatgaagcttatatcgttaaagaaccaggcgaagccgcttatgacaatgaaggcactaagcttgtgatgaaatacgatattttgaatgaagagcagtatcaaaatatctcacgaagatacgaagacaggggctttgtagcgcaaatgggcggtgaagcgatcaaggatttgttagaagaaattgatttgatcaccttattgcagagtttgaaagaagaagtgaaagacaccaattctgatgcgaaaaagaaaaaactcattaagcgtttgaaagtggtagaaagctttttaaattctggtaataggcctgaatggatgatgctcacggttttaccggtattgccaccggatttaaggcctttagtcgcgctagatggcgggaagtttgcagtcagcgatgtgaatgaattgtatcgtcgtgtcatcaatcgtaaccaacgcttgaaacgcttaatggagcttggagcgccagaaatcattgtgcgcaatgaaaaaaggatgttgcaagaagccgtggatgtgctttttgataacggccgcagcactaatgcggttaaaggggctaacaaacgccctttaaaatcgctcagtgaaatcattaaaggcaagcaggggcgtttcaggcaaaaccttttaggtaagcgcgtggatttttcaggcagaagcgtgattgtggttgggcctaatctcaaaatggatgaatgcgggttgcctaaaaacatggcgttagaactcttcaaaccgcatttgttatccaagcttgaagagagaggctatgccaccacgctcaaacaggctaaacgcatgattgagcaaaaaagcaatgaagtatgggagtgcttgcaagaaatcacagaggggtatccggtgctactcaaccgcgctcctaccttgcacaagcaatccattcaagcgttccatccaaagctgattgacggcaaagcgatccaattgcacccgttagtgtgttcagcgttcaacgccgattttgacggggaccaaatggcggtgcatgtgcctttaagccaggaagcgatcgctgaatgcaaggtgctgatgctaagctctatgaatatccttttgcctgctagcggtaaggccgtagccattcctagccaagatatggttttagggctttattatctttctttagaaaagagcggggtcaagggcgagcataagcttttttctagcgtgaatgaaatcatcaccgccattgacacgaaagaattagacatccacgcaaagattagggttttagatcaagggaatattatcgctacgagtgcagggcgcatgatcattaagtccattttgcctgattttatccctacggatttgtggaacagacccatgaagaaaaaagatattggcgtgcttgtggattatgtgcataaagttggcggtatcggtattactgcaacctttttggataatttaaaaacgcttggctttaggtatgcgactaaggctggtatttctatctctatggaggatattatcacgccaaaagacaagcaaaaaatggtggaaaaagccaaagtagaggttaaaaaaatccagcaacaatacgatcaagggctgctcactgaccaagagcgttacaataagatcattgacacttggactgaagtcaatgacaaaatgagtaaagaaatgatgaccgctatcgcgcaagataaagagggctttaactctatttatatgatggcagatagcggcgcaaggggtagcgcggcgcaaatccgtcagctttcagcgatgaggggtcttatgacaaagccggacggcagtatcattgaaacgcccattatttctaactttaaagaggggttgaatgtcttagaatacttcaattccacgcatggcgctagaaagggcttagcggatacagcgctaaaaacagccaatgcggggtatttgaccagaaagctcattgatgtttcgcaaaatgtcaaggtggtgtctgatgattgcggcacgcatgaagggattgaaatcacggatattgcggtggggagtgagctgattgaacctttagaagagcgtatttttgggcgcgttttattagaagatgtgatcgatcccattacgaatgaaatcttgctttatgcggacactttgattgatgaagagggtgctaaaaaggtggttgaagccgggattaaatccattacgatccgcaccccagtaacttgtaaagcgccaaagggcgtgtgcgcgaaatgctatggcttgaatttgggcgaaggcaagatgagttatccgggtgaagcggtgggcgtggtagccgcgcaatctattggggagcctggaacgcagctcactttaaggactttccatgtgggcgggacagcgagcaggagtcaggatgagcgcgaaatcgtagcgagcaaagaaggttttgtgcgtttttacaaccttaggacttacacgaataaagagggtaaaaacattatcgctaaccgccgtaacgcttctattttagtggtagagcctaagattaaagcgccttttgatggggaattacgcattgaaacggtttatgaagaagtcgttgtgagcgtgaaaaatggcgatcaagaagctaaatttgttttaaggagaagcgatattgtcaagccaagcgaattagccggcgttggcggtaagattgaggggaaagtgtatttgccttatgctagtgggcataaggtgcataaggggggaagtatcgctgatattatccaagagggctggaatgtgcctaatcgcatcccttatgcgagcgaattgctagtcaaggataatgaccctattgcgcaagatgtgtatgccaaagaaaaaggcgtaatcaaatactatgttttagaggctaaccatttagagcgcacccatgggatcaaaaagggcgatatggtgagtgaaaaaggcttgtttgcggtgatagctgatgataatggtagggaagccgctcgccattatatcgctaggggttctgagatcttgattgatgataatagtgaagtgagcactaatagcgtgatttctaaacccacgactaacactttcaaaacgattgccacatgggatccttacaacacccctatcattgcggactttaaaggtaaggtgggttttgtggatgttatcgcaggggttacggtcgctgaaaaagaagacgaaaataccggtatcacaagcttagtggtgaatgattacattccaagcggatacaaaccaagcttgtttttagagggggctaatggcgaagagatgcgttatttcctagagccaaaaacctctatcgccattagcgatggctctagcgtggagcaagctgaagtgttagcgaaaatccctaaagcgaccgttaaatctagggatattaccgggggtctcccaagggtttcggaactctttgaagcgagaaaacccaagcctaaagatgtggcgatcctttctgaagttgatgggattgtgagttttggcaaacccattcgcaataaagaacacatcatcgtaacttctaaagatggccgttccatggattattttgtggataaaggcaagcaaattttagtgcatgccgatgaatttgtgcatgcgggagaagcgatgacggacggagtaatttcaagccatgatattttaaggatcagtggcgaaaaagagctttataaatacattgtgagcgaagtccagcaagtgtatcgcaggcagggggtgagcattgcggacaagcacattgaaatcattgtttctcaaatgctaagacaggtgcgtattttagacagcggggatagcaagtttattgaaggggatttagtcagtaaaaaacttttcaaagaagaaaacgctcgtgtgatcgctttaaaaggcgagccagcgattgctgaaccggtgcttttagggatcactagagcggctattgggagcgatagcatcatctcagcggcctctttccaagaaacgactaaagttttaacagaagccagtatcgctatgaaaaaagactttttagaggatttgaaagagaatgtggtgttggggaggatgatccctgtgggaacaggcatgtataagaataaaaaaatcgtgttaagagcgcttgaggataactctaaattttgatatgaaaaatcggttaagatttttaaaagaaaaattagggtaaaatggggga

SEQ ID NO: 308 - protein, 1797 aa, Helicobacter pylori
  VARIANT 85: Xaa = Any Amino Acid
MAGRHGNKGIVSNIVPVADMPYTADGEPVDIVLNPLGVPSRMNIGQILEMHLGLVGKEFGKQIARMLEDKTKDFAKELRAKMLEXANAINEKDPLTIHALENCSDEELLEYAKDWSKGVKMAIPVFEGISQEKFYKLFELAKIAMDGKMDLYDGRTGEKMRERVNVGYMYMIKLHHLVDEKVHARSTGPYSLVTHQPVGGKALFGGQRFGEMEVWALEAYGAAHTLKEMLTIKSDDIRGRENAYRAIAKGEQVGESEIPETFYVLTKELQSLALDINIFGDDVDEDGAPKPIVIKEDDRPKDFSSFQLTLASPEKIHSWSYGEVKKPETINYRTLKPERDGLFCMKIFGPTKDYECLCGKYKKPRFKDIGTCEKCGVAITHSKVRRFRMGHIELATPVAHIWYVNSLPSRIGTLLGVKMKDLERVLYYEAYIVKEPGEAAYDNEGTKLVMKYDILNEEQYQNISRRYEDRGFVAQMGGEAIKDLLEEIDLITLLQSLKEEVKDTNSDAKKKKLIKRLKVVESFLNSGNRPEWMMLTVLPVLPPDLRPLVALDGGKFAVSDVNELYRRVINRNQRLKRLMELGAPEIIVRNEKRMLQEAVDVLFDNGRSTNAVKGANKRPLKSLSEIIKGKQGRFRQNLLGKRVDFSGRSVIVVGPNLKMDECGLPKNMALELFKPHLLSKLEERGYATTLKQAKRMIEQKSNEVWECLQEITEGYPVLLNRAPTLHKQSIQAFHPKLIDGKAIQLHPLVCSAFNADFDGDQMAVHVPLSQEAIAECKVLMLSSMNILLPASGKAVAIPSQDMVLGLYYLSLEKSGVKGEHKLFSSVNEIITAIDTKELDIHAKIRVLDQGNIIATSAGRMIIKSILPDFIPTDLWNRPMKKKDIGVLVDYVHKVGGIGITATFLDNLKTLGFRYATKAGISISMEDIITPKDKQKMVEKAKVEVKKIQQQYDQGLLTDQERYNKIIDTWTEVNDKMSKEMMTAIAQDKEGFNSIYMMADSGARGSAAQIRQLSAMRGLMTKPDGSIIETPIISNFKEGLNVLEYFNSTHGARKGLADTALKTANAGYLTRKLIDVSQNVKVVSDDCGTHEGIEITDIAVGSELIEPLEERIFGRVLLEDVIDPITNEILLYADTLIDEEGAKKVVEAGIKSITIRTPVTCKAPKGVCAKCYGLNLGEGKMSYPGEAVGVVAAQSIGEPGTQLTLRTFHVGGTASRSQDEREIVASKEGFVRFYNLRTYTNKEGKNIIANRRNASILVVEPKIKAPFDGELRIETVYEEVVVSVKNGDQEAKFVLRRSDIVKPSELAGVGGKIEGKVYLPYASGHKVHKGGSIADIIQEGWNVPNRIPYASELLVKDNDPIAQDVYAKEKGVIKYYVLEANHLERTHGIKKGDMVSEKGLFAVIADDNGREAARHYIARGSEILIDDNSEVSTNSVISKPTTNTFKTIATWDPYNTPIIADFKGKVGFVDVIAGVTVAEKEDENTGITSLVVNDYIPSGYKPSLFLEGANGEEMRYFLEPKTSIAISDGSSVEQAEVLAKIPKATVKSRDITGGLPRVSELFEARKPKPKDVAILSEVDGIVSFGKPIRNKEHIIVTSKDGRSMDYFVDKGKQILVHADEFVHAGEAMTDGVISSHDILRISGEKELYKYIVSEVQQVYRRQGVSIADKHIEIIVSQMLRQVRILDSGDSKFIEGDLVSKKLFKEENARVIALKGEPAIAEPVLLGITRAAIGSDSIISAASFQETTKVLTEASIAMKKDFLEDLKENVVLGRMIPVGTGMYKNKKIVLRALEDNSKF

SEQ ID NO: 309 - DNA, 690 bp, Helicobacter pylori
  CDS (65)...(640)
taagcgatttgctctgtgtggtgattgaccctaggattgattttgaaaagcgttgagggtaggaatgaaaactgagatgaaatcttctttaaaactttttatgcggcctttgttggtggttttagcgttcatgttgttgtatgctttagtgcatgctgcgcttggtttttatgtaaaaaaagacagcgctccaataagcccaaatgtagaaaaaaccgagacagagcgtcaaaacggcgtgctttcgcccaaacaagaagaagccaacgcaaccacaactgccacagaagaaagccccaccaaagacacagcgccgcctttagacacagccgcgcaaaaacaagaaactaaacaagagcaagaaaaagaaaacgagcctaaacaagatagcgtcccgcccgttcaaaacaatcaaaaaacccctacaacccccttaatgggaaaaaaacctttagagtataaagtcgcagtcagtggcgtgaatgtgcgcgcttttcccagcacaaaaggtaaaatcttgggattgcttttaaaaaataaaagcgtgaaagttttagaaatccaaaacgattgggctgaaattgaattttctcacgaaacaaagggctatgtgtttttaaaacttttaaaaaaggctgaatgaaagaataatgaaattaaaatcttttggggtttttggaaatcccatta

SEQ ID NO: 310 - protein, 192 aa, Helicobacter pylori
MKTEMKSSLKLFMRPLLVVLAFMLLYALVHAALGFYVKKDSAPISPNVEKTETERQNGVLSPKQEEANATTTATEESPTKDTAPPLDTAAQKQETKQEQEKENEPKQDSVPPVQNNQKTPTTPLMGKKPLEYKVAVSGVNVRAFPSTKGKILGLLLKNKSVKVLEIQNDWAEIEFSHETKGYVFLKLLKKAE

SEQ ID NO: 311 - DNA, 1550 bp, Helicobacter pylori
  CDS (66)...(1502)
ttatgacttttactaaacctttttttaagctataatccaaaaatctaaaataaaaaggaataagcatgaaaaaatccctttgtctgtctttctttctgactttctctaaccctcttcaagcccttgtgatcgagcttttagaagaaatcaaaacttcgccgcataaaggcacttttaaggctaaagtccttgattctaaaaaaccaagacaagttttaggcgtttataatatctccccacacaaaaaactcacgctcactatcacccacatatccactgcaatcgtctatcaaccccttgatgaaaaactttctttagaaacaaccttaaaccctaaccgccctactatccctagaaacacccagattgttttttcttcaaaagaattgaaagagtcgcacccgcaccaaatgccttctttaaacgcgcccatgcaaaaaccacaaaacaaaccccattcatcgcaacaaccttctcaaaacttttcttacccagagcccaaactaggctctaaaaactctaaaaacagccttttacagcctttagcaattcctagcaaaataagtcccactaacgaaactcaaacgccaacaaacgacactaaaccccctttaaagcattcttcagaagatcaagaaagcaacctctttataacgccacccactgaaaaaacgctccctaacaacacctctaacgctgatattagtgaaaacaatgaaagcaatgagaataaagataatgtggaaaaacaagccattagagatgctaatattaaagaatttgcatgcgggaagtgggtctatgacgatgaaaatttacaagcctaccgcccaagcattttaaaacgcgttgatgaagacaaacaaactgcaacagatattaccccttgcgattacagcaccgctgaaaataaaagcggtaaaatcattaccccctatactaaaatctccgttcataaaacagagcctttagaagagccacaaacttttgaagctaaaaataatttcgccattcttcaagccagaagctctacagaaaaatgcaaaagggctagagcaagaaaagacggcacgactaggcaatgctatctaatagaagagcctttaaaacaagcatgggagagtgagtatgaaatcaccacgcaattagtgaaagccatttatgagcgccccaaacaagacgatcaagtagagccgactttttatgaaaccagcgaattggcttattcttccacacgaaaaagcgaaataacgcacaatgaattgaatttgaatgaaaaattcatggaatttgtggaagtgtatgaggggcattatttaaacgatataattaaagagagcagtgaatataaagaatgggttaaaaaccatgtgcgctttaaagaaggggtgtgcatggctttagaaatagaagaacagccacgagctaaaagcacgcctttgagtattgaaaactctcgtgtggtatgtgtcaaaaaggggaattatttattcaacgaagtttaagatggtggcttgaggcggaatcgaaccaccgacacgaagattttc

SEQ ID NO: 312 - protein, 479 aa, Helicobacter pylori
MKKSLCLSFFLTFSNPLQALVIELLEEIKTSPHKGTFKAKVLDSKKPRQVLGVYNISPHKKLTLTITHISTAIVYQPLDEKLSLETTLNPNRPTIPRNTQIVFSSKELKESHPHQMPSLNAPMQKPQNKPHSSQQPSQNFSYPEPKLGSKNSKNSLLQPLAIPSKISPTNETQTPTNDTKPPLKHSSEDQESNLFITPPTEKTLPNNTSNADISENNESNENKDNVEKQAIRDANIKEFACGKWVYDDENLQAYRPSILKRVDEDKQTATDITPCDYSTAENKSGKIITPYTKISVHKTEPLEEPQTFEAKNNFAILQARSSTEKCKRARARKDGTTRQCYLIEEPLKQAWESEYEITTQLVKAIYERPKQDDQVEPTFYETSELAYSSTRKSEITHNELNLNEKFMEFVEVYEGHYLNDIIKESSEYKEWVKNHVRFKEGVCMALEIEEQPRAKSTPLSIENSRVVCVKKGNYLFNEV

SEQ ID NO: 313 - DNA, 620 bp, Helicobacter pylori
  CDS (68)...(568)
tgtaaaatagggatttgctaggcctttagtcgttaaaaggtaattatcattaaggagttttttaatcatggcagatattcaaaggcgtgattttttaggaatgagccttgctagtgttacagctataggggctatagcgagtctggtagcgatgaaaaagacttgggatccgcttccaagcgttgtttcagccggttttacgaccatagatgtggcgaatatgcaagaagggcagttttccaccgtggaatggcgtgggaaaccggtctatatcctcaagcgttctaaaaaagagggctttaatgaaaagcgcgattttaaagttggcgagagcgtttttaccacagccattcaaatttgcacgcatttagggtgtatccccacttatcaagatgaagaaaaaggctttttatgcccatgccatggggggcgtttcacttctgatggcgtgaatattgccggcactccccctccacgcccttttgatatcccgccttttaaaattgaaggcactaagatcacttttggtgaagccggggctgaatacaagaaaatgatggctaaagcgtaaggagagtttaatggcagagataaaaaaagcgaaaaatttaggcgaatgg

SEQ ID NO: 314 - protein, 167 aa, Helicobacter pylori
MADIQRRDFLGMSLASVTAIGAIASLVAMKKTWDPLPSVVSAGFTTIDVANMQEGQFSTVEWRGKPVYILKRSKKEGFNEKRDFKVGESVFTTAIQICTHLGCIPTYQDEEKGFLCPCHGGRFTSDGVNIAGTPPPRPFDIPPFKIEGTKITFGEAGAEYKKMMAKA

SEQ ID NO: 315 - DNA, 1221 bp, Helicobacter pylori
  CDS (52)...(1167)
ttataatcaaagctattttaaaagctgaatagctatagttattaggatgcgatgtcaaaaagaatgaagtgttttagtcaaaaatggttggttttttttgttacccttttattggcttctttaggccatgcgaaaatggcttttgaatccgatattgacaccaaagcgctagaggcttttggggttaatgcgggctttttatcccaaatgcccaacgctttaaaaaaaatgaataaagaagaagaatggaagagacttgtcaaaagatttgatgtgaattaccagttcatccccatcattaaaaacatgctcatagaagcgagcgtgccgcaagaatttttatttttagccatggccgagtctaaattttcatcaagggcttatagcaggaaaaaagcggtagggatttggcaattcatgccaagcacggctaaagaattagggcttaaggtcaatcattacattgatgaaagaagagatcccattaaaagcactcaagcggcgatcacttatttgaaacggctctacaagcaaaccggagagtggtatttggtcgctatggcgtataattacggcttacgcaaggttcaaaacgctattaaagccgccggcacttcggacattaaaattttgttggatgaagataagaaatacctccctaaagaaacacgagagtatatccgctccattctaagcctagcgttaaaattcaacagcctagacaacctcaaagataaagaatatctgctcaatcgtggggcgagggtgagtttagtgggcgtcccgtttaaaaggcgtgcttctttagtccaagtagccaaaaatttgaatttgagtttggaaaccttaaaatcctacaaccaccaattccgttataacattctgccttctaaagaccccacttataccatttatatcccttatgaaaaactcgctcttttcaaacaacgccagatcaaacaaaataaaaacattcaagccagttcaaaaagcccttttatcacccatgtggtcttacctaaagaaaccctatcttctatcgctaaacgctatcaagtcagtatttccaatatccaattagccaatgatctcaaagattctaatatttttatccaccagcgtttaatcatccccaccaacaaaaaattactcgctacaagggaattttaatgggtttggcgttggaaaaagtttgttttttaggcgttatttttttgatta

SEQ ID NO: 316 - protein, 372 aa, Helicobacter pylori
MSKRMKCFSQKWLVFFVTLLLASLGHAKMAFESDIDTKALEAFGVNAGFLSQMPNALKKMNKEEEWKRLVKRFDVNYQFIPIIKNMLIEASVPQEFLFLAMAESKFSSRAYSRKKAVGIWQFMPSTAKELGLKVNHYIDERRDPIKSTQAAITYLKRLYKQTGEWYLVAMAYNYGLRKVQNAIKAAGTSDIKILLDEDKKYLPKETREYIRSILSLALKFNSLDNLKDKEYLLNRGARVSLVGVPFKRRASLVQVAKNLNLSLETLKSYNHQFRYNILPSKDPTYTIYIPYEKLALFKQRQIKQNKNIQASSKSPFITHVVLPKETLSSIAKRYQVSISNIQLANDLKDSNIFIHQRLIIPTNKKLLATREF

SEQ ID NO: 317 - DNA, 561 bp, Helicobacter pylori
  CDS (46)...(510)
aaatgagctaaaatgagcgtttcatttgacaaataaagggattgaatggcttttaaggtggtgcaaatttgcggagggcttgggaatcaaatgtttcaatacgctttcgctaaaagtttgcaaaaacactctaatacgcctgtgctgttagatatcacttcttttgattggagcgataggaaaatgcaattagaacttttccctattgatttgccctatgcgagcgcgaaagaaatcgctatagctaaaatgcaacacctccccaagctagtaagagacgcgctcaaatgcatgggatttgatagggtgagtcaagaaatcgtttttgaatacgagcctaaattgctaaagccaagccgcttgacttatttttttggctatttccaagatccacgatactttgatgctatatcccctttaatcaagcaaaccttcactctaccccccccccccccgaaaataataagaataataataaaaaagaggaagaatatcagtgcaagctttctttgattttagccgctaaaaacagcgtgtttgtgcatataagaagaggggatt

SEQ ID NO: 318 - protein, 155 aa, Helicobacter pylori
MAFKVVQICGGLGNQMFQYAFAKSLQKHSNTPVLLDITSFDWSDRKMQLELFPIDLPYASAKEIAIAKMQHLPKLVRDALKCMGFDRVSQEIVFEYEPKLLKPSRLTYFFGYFQDPRYFDAISPLIKQTFTLPPPPPKIIRIIIKKRKNISASFL

SEQ ID NO: 319 - DNA, 1251 bp, Helicobacter pylori
  CDS (86)...(1201)
ggttattatagtataatattgtcaaaaaataaattcaactttggattaaattgattaaaaacctattttagggaaaccgcttaaaatgagtattattattcctattgtcatcgcttttgataatcactatgccatgccggctggcgtgagcttgtattccatgctagcttgcgctaaaacagaacacccccaatcacaaaatgatagtgaaaaacttttttataagatccactgcctggtggataacttaagccttgaaaaccagagcaaactaaaagagactctagccccctttagcgctttttcgagcctagaatttttagacatttcaacccccaatcttcacgccactccaatagaaccctctgcgattgataaaatcaatgaagcttttttgcaactcaatatttacgctaagactcgcttttctaaaatggtcatgtgccgcttgtttttggcttctttattcccacaatacgacaaaatcatcatgtttgatgcagacactttgtttttaaacgatgtgagcgagagctttttcatcccactagatggctattattttggagcggctaaagattttgcttccgataaaagccctaaacattttcaaatagtgcgagaaaaagaccctcgtcaagccttttccctttatgagcattaccttaatgaaagcgatatgcaaatcatctatgaaagcaattataacgccgggtttttagtcgtgaatttaaagctgtggcgtgctgatcatttagaagagcgcttactcaatttaacccatcaaaaaggccagtgcgtgttttaccctgaacaggaccttttaacgctcgcatgctatcaaaaagttttaatcttgccttatatttataacacccaccctttcatggccaatcaaaaacgcttcatccctgacaaaaaagaaatcgtcatgctgcatttttattttgtaggaaaaccttgggttttacctactttttcatattctaaagaatggcatgagactcttttaaaaacccctttttatgctgaatattccgtgaaattccttaaacaaatgacagaatgtttaagccttaaagacaaacaaaaaacctttgaatttcttgcccccctactcaataaaaaaacccttttagaatacgtcttttttagattgaataggattttcaaacgcttaaaagaaaaattttttaactcttagcgttctcgtttgggcaacacgctataggcgaatttgacataaatcgc

SEQ ID NO: 320 - protein, 372 aa, Helicobacter pylori
MSIIIPIVIAFDNHYAMPAGVSLYSMLACAKTEHPQSQNDSEKLFYKIHCLVDNLSLENQSKLKETLAPFSAFSSLEFLDISTPNLHATPIEPSAIDKINEAFLQLNIYAKTRFSKMVMCRLFLASLFPQYDKIIMFDADTLFLNDVSESFFIPLDGYYFGAAKDFASDKSPKHFQIVREKDPRQAFSLYEHYLNESDMQIIYESNYNAGFLVVNLKLWRADHLEERLLNLTHQKGQCVFYPEQDLLTLACYQKVLILPYIYNTHPFMANQKRFIPDKKEIVMLHFYFVGKPWVLPTFSYSKEWHETLLKTPFYAEYSVKFLKQMTECLSLKDKQKTFEFLAPLLNKKTLLEYVFFRLNRIFKRLKEKFFNS

SEQ ID NO: 321 - DNA, 2241 bp, Helicobacter pylori
  CDS (52)...(2193)
caagaagccatagaagctgatgggaaattccacaaagaataagggtagaaaatgaaaataacatattgtgatgcgctaattattggaggcggactagctgggttaagggctagtatcgcatgcaaacaaaagggtttaaacaccatcgttttaagcctagtgcctgtcaggcgttcgcactctgcagccgctcaagggggcatgcaagcgagccttgcgaacgctaaaaaaagcgagggcgataatgaagatttacactttttagacacggttaaggggagcgattgggggtgcgatcagcaagtggctaggatgtttgtaaccactgctcctaaagccattagggaattggccagttggggggtgccttggactaggattaaaaagggcgataggcctgcggtcgtcaatggtgagcatgtaactatcactgaaagagacgacaggcatggttatatcttaagccgtgattttggcggcactaaaaaatggcgcacatgctttacggctgatgccacagggcataccatgctttatgcggtcgctaatgaagccttacaccacaaagtggatattcaagacagaaaggacatgctcgctttcattcatcatgataataaatgctatggggcggtggtaagggatttgatcacaggcgaaatttcagcgtatgtttctaaaggcacgcttttagctaccggaggttatgggcgcgtgtataaacacaccactaacgctgtgatttgcgatggagccggggctgcaagcgccttagaaaccggcgtggctaaattgggcaacatggaagcggtgcaattccaccctaccgctttagtgccaagcgggattttaatgaccgaaggttgcaggggcgatggcggtgttttaagagacaagtttggcagacgcttcatgcccgcttatgagccggagaaaaaagagcttgcaagcagagatgtggtctcaaggcggattttagagcatatccaaaaaggctatggagccaaatcgccttatggggatcatgtgtggctggatattgctattttagggcgtaaccatgtggaaaaaaacttaagggatgtgcgcgatatagccatgacttttgcgggcattgatccggctgatagcaaggaacaaaccaaagacaacatgcaaggagtgcccgcaaatgagcctgaatacgggcaagcgatggccaagcaaaaaggctggatccccataaaacccatgcaacactattctatgggtggggttaggacaaaccctaaaggcgaaacccatttaaaaggcttgttttgcgcgggtgaagcggcatgctgggatttgcatgggtttaaccgcttggggggtaattctgtgagtgaagcggtggtcgctggcatgatcattggggattattttgcctcgcattgtttagaagcgcaaattgaaatcaacacgcaaaaagttgaagctttcattaaagaaagccaagactatatgcattttttattgcataatgaaggcaaagaagatgtgtatgaaattagagagcgcatgaaagaagtcatggatgaaaaagtgggcgtttttagagaaggcaaaaggctagaagaagcccttaaagaattgcaagagctttatgcacgctccaaaaacatttgcgtgaaaaacaaggttttacacaataaccctgaattagaagacgcttaccgcaccaaaaaaatgctcaaactcgcgctttgtatcactcaaggagcgttactgcgcactgaaagcagaggggctcacacaaggattgactaccctaaaagagacgatgaaaaatggcttaatcggactctagcgagctggcctagcgctgagcaagacatgcccacgattgaatacgaagaattagatgtgatgaaaatggaaatcagccctgattttaggggctatggcaaaaagggtaatttcatcccccaccccaaaaaagaagagcgcgacgctgagattttgaaaacgattttagaactagaaaagcttggaaaagacagaatagaagtccaacatgcgctcatgccttttgaattgcaagaaaaatacaaggctaggaatatgcgtttagaagatgaggaagtcagggctaggggggaacatttgtattctttcaatgtccatgagttattggaccaacacaacgctaacctaaaaggagaacaccatgagtgataatgaacgaacgattgtagttagagtgctaaaatttgaccctca

SEQ ID NO: 322 - protein, 714 aa, Helicobacter pylori
MKITYCDALIIGGGLAGLRASIACKQKGLNTIVLSLVPVRRSHSAAAQGGMQASLANAKKSEGDNEDLHFLDTVKGSDWGCDQQVARMFVTTAPKAIRELASWGVPWTRIKKGDRPAVVNGEHVTITERDDRHGYILSRDFGGTKKWRTCFTADATGHTMLYAVANEALHHKVDIQDRKDMLAFIHHDNKCYGAVVRDLITGEISAYVSKGTLLATGGYGRVYKHTTNAVICDGAGAASALETGVAKLGNMEAVQFHPTALVPSGILMTEGCRGDGGVLRDKFGRRFMPAYEPEKKELASRDVVSRRILEHIQKGYGAKSPYGDHVWLDIAILGRNHVEKNLRDVRDIAMTFAGIDPADSKEQTKDNMQGVPANEPEYGQAMAKQKGWIPIKPMQHYSMGGVRTNPKGETHLKGLFCAGEAACWDLHGFNRLGGNSVSEAVVAGMIIGDYFASHCLEAQIEINTQKVEAFIKESQDYMHFLLHNEGKEDVYEIRERMKEVMDEKVGVFREGKRLEEALKELQELYARSKNICVKNKVLHNNPELEDAYRTKKMLKLALCITQGALLRTESRGAHTRIDYPKRDDEKWLNRTLASWPSAEQDMPTIEYEELDVMKMEISPDFRGYGKKGNFIPHPKKEERDAEILKTILELEKLGKDRIEVQHALMPFELQEKYKARNMRLEDEEVRARGEHLYSFNVHELLDQHNANLKGEHHE

SEQ ID NO: 323 - DNA, 496 bp, Helicobacter pylori
  CDS (77)...(445)
atttagttcaagagcttttagaagaatttttgcaaagcggggctaaagagattttagaaaaggcgcagttgttttaatgcgtttgtttatcgcgctagttttgttttggtggtggttaagcttgaacgctaaagaagcggattttatctctgatttagaatacgggatggctctttataaaaaccctaggggtgttgcgtgcgcgaaatgccatggcattaaaggcgaacaacaagaaatcaccttttattatgaaaaaggcgagaaaaaaatcctctacgcccctaaaatcaaccatttggattttaaaacctttaaagacgccttgagtttaggcaaaggcatgatgcctaaatacaatctcaatttagaagaaatccaagcgatttatctttatatcatctctttagagcataaagaagagcgtaaggattctcctaagccttaatcaaagcgcttgatttatgctaaaatggagcgttgcatttttgttttg

SEQ ID NO: 324 - protein, 123 aa, Helicobacter pylori
MRLFIALVLFWWWLSLNAKEADFISDLEYGMALYKNPRGVACAKCHGIKGEQQEITFYYEKGEKKILYAPKINHLDFKTFKDALSLGKGMMPKYNLNLEEIQAIYLYIISLEHKEERKDSPKP

SEQ ID NO: 325 - DNA, 521 bp, Helicobacter pylori
  CDS (72)...(464)
gttgcaacaaaaaatagagagcaggaaaacagacattgtgatccaatccatggcgaatattctcagcgggaatgaatgagcttatccgctatggcttgatatttctcttttttttaaaggcgtttgggcttgattatgggatagataaaacgctagaattaaaaaaagatgaagtgtttaaagcgatcatcaaagacacttcaaatgaacaaaccaaagaaatcacgctctattggacgctatatgcaaataaaggtttagtcatcaacatgcgttttaaccatttcccttaccagtttattttatacaccgatcatgcgagaaacacctataatctcaaagtttttgaagaaaaattttcttctaacagcactctgtcgcttgtgtttaaagattttaaagaagataaagccgctttaaggcttttagcccttatgccccttgttttttctcctaaagagccttaaggaatttgcatgcaagaaaaacaacttaaaaccattcaaaataagatcgcttcc

SEQ ID NO: 326 - protein, 131 aa, Helicobacter pylori
MNELIRYGLIFLFFLKAFGLDYGIDKTLELKKDEVFKAIIKDTSNEQTKEITLYWTLYANKGLVINMRFNHFPYQFILYTDHARNTYNLKVFEEKFSSNSTLSLVFKDFKEDKAALRLLALMPLVFSPKEP

SEQ ID NO: 327 - DNA, 269 bp, Helicobacter pylori
  CDS (55)...(222)
gctccctctaaaagggtttttaaactatcttgagatttacccaatttataggtgatgctttcaaaactcccatttactggtgttttagccttagttttaaaggctgtccatgttagcttagccgaagataaatccaaattcaccgcttgcaaaaaccctgctagtaaaaccgataccaaaaccatttttttcattcattatcctttaatgtggtcttatcaataacgcttattattttagtgtaaataagcacgcttacaactaaaacg

SEQ ID NO: 328 - protein, 56 aa, Helicobacter pylori
MLSKLPFTGVLALVLKAVHVSLAEDKSKFTACKNPASKTDTKTIFFIHYPLMWSYQ

SEQ ID NO: 329 - DNA, 671 bp, Helicobacter pylori
  CDS (66)...(611)
aatgactttaggggatattcttaaagaaaaactctaaagagtgattttaaaagcatgagaatggcatgagatttaagggtgttgttgcttttatttccctagctgtcgctcttggcgttttagcctatttgtttttaagcgttaaaaaagaaatgcccgctacttctcatgcgatctctcaaacacatgcgatctctcaaaccaatgaaggcctctctcaaacagatgcaaaaagccatgacatcgatctagaagaaaatagccccactgaaacctctcataatgaaaaagcctcccataacgaagaagatcacaataacgccctttctcaaaatcttgatgcgcaagaatctatcaattaccccgttgtggaacattattctgaaatcccttttgaagaaaaaaaaagggaatattcaaagcttatcattaaggatttaaaggactatcaatggtggtgcttaaaagaaatcctcaaaaaagaacagattgattacgcttacgataacaccaaaaaccaacctaacctcatcatctatttagatgaaaataaaaaagaacgcttgctggctgatttagactattataaaatacgctatcatgctgttttttaaattcaaaggataaaaatgtatcaagtagccatttgcgaccccatccatgctaaaggc

SEQ ID NO: 330 - protein, 182 aa, Helicobacter pylori
MRFKGVVAFISLAVALGVLAYLFLSVKKEMPATSHAISQTHAISQTNEGLSQTDAKSHDIDLEENSPTETSHNEKASHNEEDHNNALSQNLDAQESINYPVVEHYSEIPFEEKKREYSKLIIKDLKDYQWWCLKEILKKEQIDYAYDNTKNQPNLIIYLDENKKERLLADLDYYKIRYHAVF

SEQ ID NO: 331 - DNA, 341 bp, Helicobacter pylori
  CDS (86)...(295)
acccacaaaactaaaacccactaacacaattaaccctaacaacacataaagattgcccaaagacgcgcacaacacgctcgcaacaatggttgcaaaaacaaacacaatcccccccatcgtaggggtatcttttttattctggtggcttggcacgaagctagaaatgggctggttagcctttttagccttggcccatagaatgaatttaggcattaaaaaaagcgtgagaaaaaaagctatgaaaaaccctaaccctgctctaaaagtcaaatactggaaaagattgatattgaaatagccatatagtaaagaatagagcataaaatcccctaaaatcgcca

SEQ ID NO: 332 - protein, 70 aa, Helicobacter pylori
MVAKTNTIPPIVGVSFLFWWLGTKLEMGWLAFLALAHRMNLGIKKSVRKKAMKNPNPALKVKYWKRLILK

SEQ ID NO: 333 - DNA, 2481 bp, Helicobacter pylori
  CDS (58)...(2430)
tttttttttttttttgatttttattttttaaatttttagattaaggagagttgttggatgtttttaagagtatacccaaagcttagatacgctttatgtttccccctactcgctgagacttgctatagcgaagagcggactttaaataaggttaccacccaagctaaaaggattttcacttacaacaatgagtttaaagtaacttctaaagaactagatcaacgccaaagcaatgaagtcaaggacttgtttaggactaaccctgatgtgaatgtgggcggagggagcgtgatggggcagaaaatctatgtgagaggcgttgaagacaggcttttaagggttacagtggatggggctgcacaaaatggcaatatctaccaccaccaaggcaacaccgtgattgaccctggcatgctcaaaagcgtggaagttaccaaaggcgcggcgaatgcgagcgcggggccaggagcgattgcgggagtgattaaaatggagactaaaggagcggctgattttatccctagggggaaaaattatgctgccagtggggcggtgagtttttataccaattttggcgatcgagagactttcagatcggcttatcaaaacgcgcattttgatattatcgcttactacacgcaccaaaacatcttctattatagaagcggcgctacagcgatgaaaaaccttttcaatcccacacaagccgataaagagccaggaactcctagcgagcaaaacaacgctttgattaaaatgaatggttatttgagcgacagagacacgctcactttcagctggaacatgacacgagataacgctacacgccctttaaggagtaacgctatagggttagcctatccttgtgaagccccctttagtcctgatagttctcaagggtgtcctaatgtgttagatagtttcacaagatacatgtatcactctattaatagtgccaacaatctttccttacaatacaaaagggaagcgggaaattcttttggcgacccacgattagattttaccctttatacaagcatcaggaacgctcagtttgatcccctatttgatcctaatggcgtttatgctaaattccccacttctttagcgagcgcatgggaaaaagaaaattacccatgcgttgaaggcgcttattgcaccccaagcttttcagatgtggataaaccaagctcacagcctaggaatttgtttttaaacaacaccggcttaaaccttaaagtcgcgcatgtgattgatgaagccacagacagcctttttgaatacggattcaactaccaaaatttgagcgtttttgacgctcgcatccctaaatcagaattatacaggcctaatcaagtttatactgatgataaaggacaaaaacaaatcgcttgctctcttgtgaataataaccccaatgaccccactctgtgccaaagagggaaagcgaacgggaatatttatggaggctacgtgcaagcgaattactcgcctcataaaatcatcacttttggagccggggtaaggtgggacgcttacacgctttatgataaagactggaaccaccgctacactcaaggctttagccctagcgcggctcttgtgctaagccccattgagcctttatctttaaaaatcacttattctcaagttacaagaggggtgatgccaggagatggcgtgtacatgcgtcaaaacgatttacgatacgccaaaaacatcaagcctgaagtgggctctaacgctgaatttaatattgattattcaagccagtattttagcgggagggctgcggcgttttatcaggctttggataatttcatctcacaatacgcacaaaatttgattgtaaccaatttgagtcaagcgattcgtatttatggctatgaagtgggtgggactttcagatacaagggcgtgagtttgaatgtaggggtctcgcgcacctggcccaccactagggggtatttaatggcggatagctatgagcttgccgcaagcaccggtaatgtttttatcatcaaattggattacaccatccccaaaacagggatcaatcttgcatggcttagccgctttgttaccggtttagattattgcgggtttgatatttacttgcctgattatgggacggctgagaaacccaaaacccctaccgatttagccaaatgcggatctcaattagggttagtgcatatgcataaaccgggctatggcgtgagtaatttttatatcaattggagtcctaaaaccaaaagccgctggaagggtttgttgctttcagccgtgtttaataatgttttcaacaaattctatgtggatcaaacaagcccttatgtcatgagcccggatatgccaggcactgacgctgttaaaagagcgatcgctgagcctgggtttaacgcgcgttttgaagtggcttacaaatggtagttaatggagctttaagcgttgcgcatgcgtgatagcaacggctatcgc

SEQ ID NO: 334 - protein, 791 aa, Helicobacter pylori
MFLRVYPKLRYALCFPLLAETCYSEERTLNKVTTQAKRIFTYNNEFKVTSKELDQRQSNEVKDLFRTNPDVNVGGGSVMGQKIYVRGVEDRLLRVTVDGAAQNGNIYHHQGNTVIDPGMLKSVEVTKGAANASAGPGAIAGVIKMETKGAADFIPRGKNYAASGAVSFYTNFGDRETFRSAYQNAHFDIIAYYTHQNIFYYRSGATAMKNLFNPTQADKEPGTPSEQNNALIKMNGYLSDRDTLTFSWNMTRDNATRPLRSNAIGLAYPCEAPFSPDSSQGCPNVLDSFTRYMYHSINSANNLSLQYKREAGNSFGDPRLDFTLYTSIRNAQFDPLFDPNGVYAKFPTSLASAWEKENYPCVEGAYCTPSFSDVDKPSSQPRNLFLNNTGLNLKVAHVIDEATDSLFEYGFNYQNLSVFDARIPKSELYRPNQVYTDDKGQKQIACSLVNNNPNDPTLCQRGKANGNIYGGYVQANYSPHKIITFGAGVRWDAYTLYDKDWNHRYTQGFSPSAALVLSPIEPLSLKITYSQVTRGVMPGDGVYMRQNDLRYAKNIKPEVGSNAEFNIDYSSQYFSGRAAAFYQALDNFISQYAQNLIVTNLSQAIRIYGYEVGGTFRYKGVSLNVGVSRTWPTTRGYLMADSYELAASTGNVFIIKLDYTIPKTGINLAWLSRFVTGLDYCGFDIYLPDYGTAEKPKTPTDLAKCGSQLGLVHMHKPGYGVSNFYINWSPKTKSRWKGLLLSAVFNNVFNKFYVDQTSPYVMSPDMPGTDAVKRAIAEPGFNARFEVAYKW

SEQ ID NO: 335 - DNA, 477 bp, Helicobacter pylori
  CDS (120)...(428)
gtcggtcgggtaatgttcaaattcacaaatgagtctgaagacaaagaagtcttgatctagaagccgaaattctcataccgcacttagaattgcgtcaaaaacaaattgatgcgctgttggtgcacgatattaccaagctatgttacaccaaaccactagggtgtgttgtgctgttcagcaaggatactgatcttgtgcctgtgttagaatccgcttgggagaaaggctttgaagtcttcattgctaacattcaagaatgccccaattctgtcccttcagacttgaagaagtcttgcaatgtgagggaacgcagtgtcgctgaaattgtagataacttgcccaaaaatcagcacactcccaagaaaaagaacttttccaccaacgagccttttaacaacccatttaaagaccaactctttaagaagaactaacacgatccccacaccaaggggacaaaaaagcacccattttaaaagg

SEQ ID NO: 336 - protein, 103 aa, Helicobacter pylori
VHDITKLCYTKPLGCVVLFSKDTDLVPVLESAWEKGFEVFIANIQECPNSVPSDLKKSCNVRERSVAEIVDNLPKNQHTPKKKNFSTNEPFNNPFKDQLFKKN

SEQ ID NO: 337 - DNA, 685 bp, Helicobacter pylori
  CDS (220)...(624)
  misc_feature 121: n = A,T,C or G
tcttttgaaattgcctgatgtggaaaaagaaatgcccaaagagacgactcaaaaaagcttgttttcgcacaaacactttgtttttggggcttggggatctttttttatgtggggggagaantggcgattggctcattcttggtgctaagctttgaaaagcttttgaatttagactctcaatcaagcgcgcattacttggtgtattattggggaggcgcgatggtgggccgtttcttaggcagtgtgttgatgaataaaattgcccctaataaatacttggctttcaacgccttaagctctattgttctcatcgctttagccattatcattggaggcaagatcgctttattcgctctgacttttgtgggctttttcaactctatcatgttccctaccatcttttctttggctacgctcaatttagggcatctcacttctaaagcttctggggtgattagcatggcgattgtgggaggggcgttaatcccccccattcaaggtgcggttacagacatgctaacagcaaccgaatcaaatttgctctacgcttatggtgtgccgttgttgtgctatttttatattctcttctttgcgcttaaagggtataagcaagaagaaaactcctaaaaaaagggggggtttctttcttctttcctttcttttatcttgttttaaaaatcagtaa

SEQ ID NO: 338 - protein, 135 aa, Helicobacter pylori
MVGRFLGSVLMNKIAPNKYLAFNALSSIVLIALAIIIGGKIALFALTFVGFFNSIMFPTIFSLATLNLGHLTSKASGVISMAIVGGALIPPIQGAVTDMLTATESNLLYAYGVPLLCYFYILFFALKGYKQEENS

SEQ ID NO: 339 - DNA, 809 bp, Helicobacter pylori
  CDS (58)...(765)
accgatcactaaaaccaatgtaacttaccgctctttacagcgtaagtgagaaaaggaatgcatttgaatacggattttagccatatcaccgatatagagggcatgcgttttatcaatgaagaagacgctttgaacaaattgattaatgaaatccacacgcgccacattgatttaaaagattccatcatgctcgctttgagttttaacgctctgtatttagctcacgctttagcgcaaaaatttggagcgacttatgatatactttttttagaacctatcctagcccctttaaactcaaaatgcgagatcgctttagtgagtgagagcatggatatagtgatgaatgaaagtttgatcaattcctttgacatcactttagactatgtttatggggaagccaagcgagcttatgaagaagacattttgtctcacatctatcagtatcgcaaaggcaatgcgatcaaaagcttaaaagataaaaatatttttatcgtagatagggggattgaaaccgggtttagagcagggttaggcgtgcaaacttgcttgaaaaaagaatgccaagacatttatattttaacccccattgtcgcgcaaaatgtcgctcaaggcttagaaagtttgtgcgatggggtgattagtgtgtatcgccctgaatgttttgtctctgtggagcatcattataaagaactcaagcgattaagcaatgaagaagttgaaaaatacttgggcgctaacaacatgcctaatttaaaaaaggaacattaaatatggattttatcaccatcaattctagtaacaaaaccgaa

SEQ ID NO: 340 - protein, 236 aa, Helicobacter pylori
MHLNTDFSHITDIEGMRFINEEDALNKLINEIHTRHIDLKDSIMLALSFNALYLAHALAQKFGATYDILFLEPILAPLNSKCEIALVSESMDIVMNESLINSFDITLDYVYGEAKRAYEEDILSHIYQYRKGNAIKSLKDKNIFIVDRGIETGFRAGLGVQTCLKKECQDIYILTPIVAQNVAQGLESLCDGVISVYRPECFVSVEHHYKELKRLSNEEVEKYLGANNMPNLKKEH

SEQ ID NO: 341 - DNA, 325 bp, Helicobacter pylori
  CDS (70)...(285)
taacacaagccaccatgagcatactatcgccatagttggcaataaagcagtgattcttacggagcgttaatggcaagagatgatgttatagaagtggatgggaaagtgattgaggcgttgcctaacgctacttttaaggtggagttagacaataagcatgtggtgttgtgccgtatttctggaaagatgcgcatgcactatattaggattgctttaggcgatagggttaagctagagcttacgccctatagcttagacaaaggtcggataacttttagatataaatgaatttaagggttatttcaatgaaaatatgttaatataa

SEQ ID NO: 342 - protein, 72 aa, Helicobacter pylori
MARDDVIEVDGKVIEALPNATFKVELDNKHVVLCRISGKMRMHYIRIALGDRVKLELTPYSLDKGRITFRYK

SEQ ID NO: 343 - DNA, 360 bp, Helicobacter pylori
  CDS (52)...(309)
atcgctcaaatttcaacgaccatgcttgttaaaaaaaactaaaggaatgttatgcaagatgaattatttgaaaccgaaaaaatccccccaaaaaacactaaaaatactaaaaacgcccctaaaaaaagttttgaagagcatgttcattccctagagcgagccatagatcgcttgaatgatcccaatttatccttaaaagacgggatggatttgtataaaacggccatgcaagagttgtttttggctcaaaagcttttagaaaacgcttatttagagcatgaaaaactccaaacgccagaccaaaaggcttaaagcatgcgagtgtttgctttgcaattagaatcttttaaagaaaatctc

SEQ ID NO: 344 - protein, 86 aa, Helicobacter pylori
MQDELFETEKIPPKNTKNTKNAPKKSFEEHVHSLERAIDRLNDPNLSLKDGMDLYKTAMQELFLAQKLLENAYLEHEKLQTPDQKA

SEQ ID NO: 345 - DNA, 841 bp, Helicobacter pylori
  CDS (46)...(795)
atgactaaaaagatataattcattcaaaattaaacaaggattacaatgaaactgatttcatggaatgtgaacgggttaagggcttgcatgactaagggctttatggattttttcaatagcgttgatgcggatgttttttgcattcaagaatctaaaatgcagcaagaacaaaacacctttgaatttaaagggtattttgatttttggaattgcgcgattaaaaagggctattctggggtggtaactttcactaaaaaagagcctttaagcgtgagctatggtattaatatggaagagcatgacaaagaagggcgcgtaataacttgcgaatttgagtcgttttatttggtgaatgtttatacccctaattcccaacaagccctatccaggcttagttatcgcatgagttgggaagtggagtttaagaaatttttaaaagctttagagttgaaaaaaccggtcattgtgtgtggggatttgaatgtggctcacaatgaaattgatttagaaaaccccaaaaccaaccgaaaaaatgccggctttagcgatgaagagagagaaaaattcagcgagcttttgaacgccggttttattgacactttccgttatttttaccctaacaaagaaaaggcttacacctggtggagttacatgcaacaagcaagggataaaaacattggttggcgcattgattattttttatgctctaaccctttaaaaacgcgcttaaaagacgctttaatctataaagatattttagggagcgatcattgcccggtagggttggaattagtttaaaggtagaaagtgtgcgaaataaagacagaaaaaagccttacaa

SEQ ID NO: 346 - protein, 250 aa, Helicobacter pylori
MKLISWNVNGLRACMTKGFMDFFNSVDADVFCIQESKMQQEQNTFEFKGYFDFWNCAIKKGYSGVVTFTKKEPLSVSYGINMEEHDKEGRVITCEFESFYLVNVYTPNSQQALSRLSYRMSWEVEFKKFLKALELKKPVIVCGDLNVAHNEIDLENPKTNRKNAGFSDEEREKFSELLNAGFIDTFRYFYPNKEKAYTWWSYMQQARDKNIGWRIDYFLCSNPLKTRLKDALIYKDILGSDHCPVGLELV

SEQ ID NO: 347 - DNA, 618 bp, Helicobacter pylori
  CDS (62)...(571)
agaatgcgagcgttaaaaaagaaatttatgtgcctaataagcttgttaattttgttatcgcatgagggctttacttttttttattttgttactttggttcaagggttgtgggtataagcctattgcagcttacgctcaaaacgctttaggcgatagcgtatacgtgaaactcattgtgaatttgcctaaccctgaaaactctgtagagtttaaggatttgatgaatcgtttagtcgtgcaacgcttccaaagccgcttagcgagtgaaaaggatgcggattctatcattattatagaaatcacgaatgtaaccgatacgagtatcacgcaaaataaagaaggcttcacgactttctatcgcgcaaccgtgtctgtgaattacacctacgataataaaagaggcacacaaaagacttttcaagatagcgggtattacaattacgctgtgaatttgcaagacccccttaatacctaccagaaccgctattatgctatcaatcaggctgtggaacagactttgactaaatttgtggctcaaatcgcttatgaggggaaattcaataatgaaaaatagccctttgaatggattgaatggactaaaggcgtttttagaaacaa

SEQ ID NO: 348 - protein, 170 aa, Helicobacter pylori
MRALLFFILLLWFKGCGYKPIAAYAQNALGDSVYVKLIVNLPNPENSVEFKDLMNRLVVQRFQSRLASEKDADSIIIIEITNVTDTSITQNKEGFTTFYRATVSVNYTYDNKRGTQKTFQDSGYYNYAVNLQDPLNTYQNRYYAINQAVEQTLTKFVAQIAYEGKFNNEK

SEQ ID NO: 349 - DNA, 1277 bp, Helicobacter pylori
  CDS (61)...(1224)
aatacccataaaataccttaagagaacgcctattcaaaaaccaaaaataaggaaatcctaatgactacagacagaaatttgtttttttgcgcttcgctattgatttttttgggggtattgatgagctattcgctctcaacttacaccacagtggtgctgtatcattatggggagttccattttttcatacgccagcttgtgagcgcgatcatagggattgttatcatgtgggggttgtctagggttgatcctagcaagtggtttagccgtttggggttttttcttctttttgtcccaccattactcattattggcatgttttttttgccagaaagcctttctagcagtgctgggggggcgaagcgatggattcgtttggggtttttttctctagcgcctttggagtttttgaagattggtttcaccttttttcttgcgtggagtttgtctcgcacttttgtggcaaaagaaaaggctaatgttaaagaagaactcatcacttttgtgccttattcagtggtgtttgtagccttagcgattggggtgggggttttgcaaaacgatttggggcagattgttcttttgggggcggttttagcggtgttgttggttttttctggggggagcgtgcatttgtttggcttgattatttcaggggcgtttgcgatcagcgttttagcgattgttacaagcgagcataggattttgcgcctgaaattgtggtggtctaatttgcaaaattcgcttttcacgctcttgccggatagattagcgaacgctcttagaataagcgacttgcccgaatcctatcaggtctttcatgcaggcaatgccatgcataatggggggttgtttgggcaagggcttgggcttgggcaaatcaagcttgggtttttgagcgaagtgcatacggacatggtcttagctgggatcgccgaagaatgggggtttttggggctatgcgtttgttttattttgttttctgttttgattgttttgatttttaggatcgctaaccgcttgaaagagccaaaatattcgctattttgcgtgggcgtggtgctgcttattagtttttctttggtgatcaacgcctttggggtgggcgggattcttccggttaaaggtctagcggtgccgtttttgagctatggagggagttcgcttctagcgaattgtatcgctatagggcttgttctaagcctagcgcgatacacgaaaggctaaaaacatcaacccctttttaaaaattaatgccataaaaagggctcaacctc

SEQ ID NO: 350 - protein, 388 aa, Helicobacter pylori
MTTDRNLFFCASLLIFLGVLMSYSLSTYTTVVLYHYGEFHFFIRQLVSAIIGIVIMWGLSRVDPSKWFSRLGFFLLFVPPLLIIGMFFLPESLSSSAGGAKRWIRLGFFSLAPLEFLKIGFTFFLAWSLSRTFVAKEKANVKEELITFVPYSVVFVALAIGVGVLQNDLGQIVLLGAVLAVLLVFSGGSVHLFGLIISGAFAISVLAIVTSEHRILRLKLWWSNLQNSLFTLLPDRLANALRISDLPESYQVFHAGNAMHNGGLFGQGLGLGQIKLGFLSEVHTDMVLAGIAEEWGFLGLCVCFILFSVLIVLIFRIANRLKEPKYSLFCVGVVLLISFSLVINAFGVGGILPVKGLAVPFLSYGGSSLLANCIAIGLVLSLARYTKG

SEQ ID NO: 351 - DNA, 961 bp, Helicobacter pylori
  CDS (51)...(908)
agaacagtatctatttttgttgcggttgtatatttaattaggagtttggtgtgaaacggattttattttttttagtagctacgacttttttgttgagagcagaaacggattctgccactattaacactacagttgatcccaatgttatgttttctgaaagctccacagggaatgtgaaaaaagaccgcaagagggttttaaagagcatggttaatttggaaaaagagcgcgtgaagaattttaaccggtattctgaaaccaagatgagtaagggcgacttatccgcttttggagctttctttaaggggagtttggaaagttgtgtggatcaaaagatttgttattatgagcataaagatggcaaggtttcttttgtggtgaatgacagggagaagttttataaacatgtgcttaaagacttagggacagagctttcgctccctttgtttaactggctttacaaaggctcggattttggggctttgcatgagcagtttggggatatgtatgatgggtatatcaaatacttgatcagtatggttagaataagccaaaaagaaaaggctagaaaagtggatgcaatcgttcttaagaaaatggaagaacaagctgagaaagacactaaggcagcgtttcaaaagaggagcagtggggagcttgaaagccatactgatagccctgaatttataagctcttctaagaggacacagaacgcttctaattcggatctcaattctatgaccaatgctaacgcgctcaaagaaacagcttcaaaagagccagaggcttcttcaaaaaaagagaaaaagtctaagaaaaaacgtcgcctttcaaagaaagaaaaacaacaacaagccttgcaacaagagtttgaaaaacaaattagcgactctagtaagtctgaaaaatagtaataatagttaagcttacctttttagggggctttcaataaatctcttaa

SEQ ID NO: 352 - protein, 286 aa, Helicobacter pylori
VKRILFFLVATTFLLRAETDSATINTTVDPNVMFSESSTGNVKKDRKRVLKSMVNLEKERVKNFNRYSETKMSKGDLSAFGAFFKGSLESCVDQKICYYEHKDGKVSFVVNDREKFYKHVLKDLGTELSLPLFNWLYKGSDFGALHEQFGDMYDGYIKYLISMVRISQKEKARKVDAIVLKKMEEQAEKDTKAAFQKRSSGELESHTDSPEFISSSKRTQNASNSDLNSMTNANALKETASKEPEASSKKEKKSKKKRRLSKKEKQQQALQQEFEKQISDSSKSEK

SEQ ID NO: 353 - DNA, 1555 bp, Helicobacter pylori
  CDS (51)...(1499)
ctttttagcctcaagacttgggctttaacattaaagaattattttaaggaatgatcatggaaaaataccatagcgaccaagaatacgaagaaatcatcaccgaccaattaggcgatatgcaattaagggaaaatttgcgttctgcaatggataccttaagggctaatcgtaagaatctccttaaaaatcgttacagcgaatgggaaaatttaagggaattaggcaaagaagtcaagcttaaaatcttatccaggcttgatgaatatttggaattgtttgaaaaaaacgccactcaaaacggctttaaaatccattacgctaaagacggcgatgaagctaatgaaatcatttacaacctcgctaaagaaaagaatatcaagcgcattttaaagcaaaaatccatggcgagcgaagaaattggcttgaaccattacttgaaagaaaagggcattcaagcacaagaaacggatttgggcgaattgattatccaactcatcaatgaacaccctgtgcatattgtcgtgccagctatccataaaaaccgcaagcaaatcggtaagatttttgaagaaaaactcaacgccgcttatgaagaagagcctgaaaagcttaatgcgatcgccagaaaacacatgcgcaaagaatttgaaagctttaaaatggggattagtggggttaattttgctatcgctaacgaaggagcgatctggttagtggaaaatgaaggcaatggcagaatgagcaccactgcatgcgatgtgcatgtcgcaatttgtgggattgaaaaattagtagaaagctttgatgatgcggcgattttaaacaatttgctcgccccaagcgctgtgggtgtgcctatcacttgctatcaaaacattatcacaggccctagaaaagagggcgatttagacggccctaaagaagcccacatcattttattagacaacaaccgctctaatattttggctgatgaaaagtattatcgcgctctttcatgcatccgttgcgggacttgtttgaaccactgccctgtgtatgataaaatcggtgggcatgcctatctttctacttatcctggccctataggcgtggtggtatccccccaactctttggcttgaataattacgggcatatccctaatttgtgcagtctttgcgggcgttgcactgaagtatgccccgtagaaatccctttagccgaactcattagggatttacgatccgataaagtgggcgagggcaggggtgtaattaagggggctaaaagcacccaacacagcgggatggaaaaattctctatgaaaatgtttgccaaaatggcaagcgatggggctaagtggcgtttccaattgaaaatggctcaatttttctcgcctttaggcaagcttttagctcccatactgcctttagtcaaagagtgggcgagcgttaggaccttacccaatatggacacgagcttgcatgcaaaagtccagcacttagaaggggtgatttatgagtaaagagcttattttaaagcgcattaaagaagccagagccaagcatgccattcagg

SEQ ID NO: 354 - protein, 483 aa, Helicobacter pylori
MIMEKYHSDQEYEEIITDQLGDMQLRENLRSAMDTLRANRKNLLKNRYSEWENLRELGKEVKLKILSRLDEYLELFEKNATQNGFKIHYAKDGDEANEIIYNLAKEKNIKRILKQKSMASEEIGLNHYLKEKGIQAQETDLGELIIQLINEHPVHIVVPAIHKNRKQIGKIFEEKLNAAYEEEPEKLNAIARKHMRKEFESFKMGISGVNFAIANEGAIWLVENEGNGRMSTTACDVHVAICGIEKLVESFDDAAILNNLLAPSAVGVPITCYQNIITGPRKEGDLDGPKEAHIILLDNNRSNILADEKYYRALSCIRCGTCLNHCPVYDKIGGHAYLSTYPGPIGVVVSPQLFGLNNYGHIPNLCSLCGRCTEVCPVEIPLAELIRDLRSDKVGEGRGVIKGAKSTQHSGMEKFSMKMFAKMASDGAKWRFQLKMAQFFSPLGKLLAPILPLVKEWASVRTLPNMDTSLHAKVQHLEGVIYE

SEQ ID NO: 355 - DNA, 1630 bp, Helicobacter pylori
  CDS (294)...(1577)
gtatcgccactttgcgtaacaggatgttgaaagtgggtaaaagccgctaatttctttttagtgggtcgtttttgaaaatctttttagtctttttaagcgtctttttttttaatgggtgttttgggttagtctataagactcccatttcaagctctcctatctcttatgatccctacactacccccattgggagcttgtatgctgaaaaattaaaagaaaaccctaaccatagcgcggccattcttttagaagatggctttgacgctctgttgcatagagtgggacttattagaatgagccaaaaaagcattgacatgcaaacttatatctataaaaacgacctttcttctcaagtgattgctaaagaacttttaaatgcggccaatcgtggggtaaaagtgcgcatccttttagacgataacggattggattcggatttttcagatattatgctcttaaatttccataaaaacattgaggtgaaaatttttaacccctactatatccgcaataaaggcttgcgttattttgaaatgcttgcggattatgagcgcattaaaaaacgcatgcacaacaagcttttcatcgtggataatttcgctgtcattataggggggcgcaatattggggacaattattttgataacgatttagacacgaattttttagatttagacgctttgttttttgggggggttgcttcaaaagccaaagaaagctttgaacgctattggagattccaccgctctatccctgtttcattactaagaacccataaaagactcaaaaacaacgctaaagaaatcgctaaactccatgaaaaaatccctatcagcgctgaagacaaaaaccagtttgaaaaaaaagtcaatgattttatagatcgtttccaaaaataccaataccccatttattatgggaatgccatttttttagccgattcacccaaaaaaattgacacgcccttgtattcgcctatcaaaatcgcttttgagaaagcccttaaaaacgctaaggactccgtttttatcgcttcatcgtattttattccaggcaaaaagatgatgaaaatctttaaaaatcaaatttctaaggggattgaattgaacatccttaccaattccctttcatctactgatgcgatagtggtctatggggcatgggaaaggtatcgcaaccaattagtgcgaatgggcgcgaatgtctatgaaatacgaaacgattttttcaaccgccagattaaagggcgctttagcaccaaacattccttgcatggcaagacgattgtttttgatgacaatttaacgcttctagggagtttcaatattgatccgcgctctgcatacatcaacactgaaagcgcggttttgtttgacaacccgtcttttgctaaaagggtgcgtttgtcgcttaaagatcatgcccaacaatcatggcatttggtggtgtatcggcatagagtgatttgggaagcggtggaagaaggcattttaatccatgaaaaaacttcgcctgacacttccttctttttgcgcttgattaaagaatggtctaaagtccttcctgaaagagagctttaaaacttttaatgcgctttattttgcgaaaaagcgatgttattggtaacggc

SEQ ID NO: 356 - protein, 428 aa, Helicobacter pylori
MSQKSIDMQTYIYKNDLSSQVIAKELLNAANRGVKVRILLDDNGLDSDFSDIMLLNFHKNIEVKIFNPYYIRNKGLRYFEMLADYERIKKRMHNKLFIVDNFAVIIGGRNIGDNYFDNDLDTNFLDLDALFFGGVASKAKESFERYWRFHRSIPVSLLRTHKRLKNNAKEIAKLHEKIPISAEDKNQFEKKVNDFIDRFQKYQYPIYYGNAIFLADSPKKIDTPLYSPIKIAFEKALKNAKDSVFIASSYFIPGKKMMKIFKNQISKGIELNILTNSLSSTDAIVVYGAWERYRNQLVRMGANVYEIRNDFFNRQIKGRFSTKHSLHGKTIVFDDNLTLLGSFNIDPRSAYINTESAVLFDNPSFAKRVRLSLKDHAQQSWHLVVYRHRVIWEAVEEGILIHEKTSPDTSFFLRLIKEWSKVLPEREL

SEQ ID NO: 357 - DNA, 550 bp, Helicobacter pylori
  CDS (79)...(510)
aactcttttggtgtaggatagcgatcaaggtttttatgaaaataaaagcctaaaacaattttaaaaaaaggacttttgatgaaaacatttgaaattctaaaacatttgcaagcggatgcgatcgtgttatttatgaaagtgcataacttccattggaatgtgaaaggcaccgattttttcaatgtgcataaagccactgaagaaatttatgaagagtttgcggacatgtttgacgatctcgctgaaaggatcgttcaattagggcatcaccccttagtcactttatccgaagcgatcaaactcactcgtgttaaagaagaaactaaaacgagcttccactctaaagacatctttaaagaaattctagaggactacaaatatctagaaaaagaatttaaagagctctctaacaccgctgaaaaagaaggcgataaagttaccgtaacttatgcggatgatcaattagccaagttgcaaaaatccatttggatgctgcaagcccatttggcttaagcgaccaaaaagaagccagcatgagagattacagcga

SEQ ID NO: 358 - protein, 144 aa, Helicobacter pylori
MKTFEILKHLQADAIVLFMKVHNFHWNVKGTDFFNVHKATEEIYEEFADMFDDLAERIVQLGHHPLVTLSEAIKLTRVKEETKTSFHSKDIFKEILEDYKYLEKEFKELSNTAEKEGDKVTVTYADDQLAKLQKSIWMLQAHLA

SEQ ID NO: 359 - DNA, 376 bp, Helicobacter pylori
  CDS (51)...(323)
cttttttctcttccactttttccacttttttaagagccttgtgtttatgattgggctttttgggttcaggtttgggttttggtttaggctcaggcttaggcttttctataggttttggcggggttggcggggttggcggagttgggggtgtgggaggcgttggaggtttttgggggccagccagcgtgggtttaggagcgccctgggtgtttttactgggatcttgcgaatggcctctttttaaaaccaataaattttcaggatttaatttaacaagcttgggttttgaaggaaaaaaatcttctctgtgttcaaataaaaaataaatcaaccagtgtaacaatacagacagaatgagagaaaagaaaaaattcct

SEQ ID NO: 360 - protein, 91 aa, Helicobacter pylori
LGFLGSGLGFGLGSGLGFSIGFGGVGGVGGVGGVGGVGGFWGPASVGLGAPWVFLLGSCEWPLFKTNKFSGFNLTSLGFEGKKSSLCSNKK

SEQ ID NO: 361 - DNA, 2890 bp, Helicobacter pylori
  CDS (458)...(2836)
tcaaaatttaagttaattttaataattatttttatagtatgcatcggtttgaattaaatgagaaaggttatcacaatgaatggttatttgagagtaaaaacctcttattttttagcgttgaacgctttgacttttttgtcttttaactctttggtgggcgcgaaagaacagcatcacactttgcaaaaagtgacaaccactgagcaaaaattcaatccaagcgcgccgctttcatggcaaagcgaagagatgcgtaattccacaagctctcgcacggtgatttccaacaaggaactcaaaaaaacggggaatttgaatattgaaaacgccttgcaaaacgtgccagggattcaaatcagagacgctacaggcacaggcgtgctgcctaaaatttcggtgctcaaaatttaagttaattttaataattatttttatagtatgcatcggtttgaattaaatgagaaaggttatcacaatgaatggttatttgagagtaaaaacctcttattttttagcgttgaacgctttgacttttttgtcttttaactctttggtgggcgcgaaagaacagcatcacactttgcaaaaagtgacaaccactgagcaaaaattcaatccaagcgcgccgctttcatggcaaagcgaagagatgcgtaattccacaagctctcgcacggtgatttccaacaaggaactcaaaaaaacggggaatttgaatattgaaaacgccttgcaaaacgtgccagggattcaaatcagagacgctacaggcacaggcgtgctgcctaaaatttcggtgcgcggttttggtgggggcggtaacgggcatagcaataccaacatgattttagtcaatggtatccccatttatggcgcgccgtattccaatattgaactggcgattttccctgtaactttccagtcagtggataggattgatgtgattaaagggggcacgagcgtgcaatacggccctaatacttttggaggcgtggtgaatatcatcactaaagaaatccctaaagagtgggaaaatcaagcggctgaaaggatcactttttgggggcgatcctctaatgggaattttgtagatcccaaagaaaaaggcaagcctttagcccaaactttaggaaaccaaatgctgtttaacacttacgggcgaacggctggaatgttgggtaagcatgtaggaattagcgctcaaggcaattggattaacgggcaaggtttcaggcaaaacagccccacaaaggtgcaaaactacttgcttgatgcggtttataagattaatgcgaccaatacttttaaagcttattaccaatattatcaatacaactcttaccatccaggcactttgagtgcacaagattatgcttataaccgcttcattaatgagcgccctgacaatcaagatggagggcgagccaagcgctttgggatcgtgtatcaaaattattttggcgatccggataggaaagtggggggagattttaaattcacttatttcacgcatgacatgagtagggattttgggttttccaaccaataccaaagcgtgtatatgagcagtcaaaacaagattttaccttttaaaggcaagggaaaaattagcgcgactaaccctaattgcggtttgtattcttatagcgacacgaacagcccttgttggcaattttttgacaatatccgccgatccgtggtgaatgcctttgagccaaaactcaatcttatcgtcaataccggtaaagtcaaacaaacttttaatatgggaatgcgctttttaactgaagatttataccgccgatccaccaccaggaaaaaccctagcatgcctaataatgggagtggttttgatgcaggaacttcactcaataatttcaacaattataccgctgtgtatgccagcgatgagatcaatttcaataacggcatgctaacgatcacgccgggcttgagatacacttttttaaattacgaaaaaaaagacgctcctccttttaaagcaggccaaacaggaaaaaccattaaagatcgttataaccaatggaatccagcagtgaatgtcggctataaacccattaaagaattgttgttttatttcaattaccaaagaagctacattccgcctcaattcagcaatatcggtagttttgtaggcacaagcacggattattttcaaatctttaatgtcatggaaggcggctcaagatattattttaacaaccaagtgagttttaacgcgaattattttgtgatttttgcgaataactattttaccgggcgctatggggataataaagagccggtcaatgcgagatcgcaaggcgtggagctagagttgtattacacgccgattagagggcttaatttccatgcggcttacactttcatagatgccaatatcacaagccacacgatggttactaaccccgctaatcctaaagggcctaaaaaagatatttttggcaaaaagctcccttttgtaagcccgcaccaattcattttagacgcgagctacacttacgctaaaaccacgattgggttgagttctttcttttatagccgaacttatagcgatgtgttaaacaccgtgccttttattcaatacgcgcccacgatcaaaaatggtgctatcactaccaaaacagcgggcatgacgccatggtattgggtgtggaatttgcaaatttctaccactttttgggaacgcaaaaagcaaagcgttaatgcgagcttgcaaatcaataacatttttaacatgaaatattggtttagcgggataggcactagcctaacgggaaagaagccgcgcctcctaggagcatcacagcgtatgtgagctatcatttttaattttagggttgtaatgttttgagaagttgggcgtaaa

SEQ ID NO: 362 - protein, 793 aa, Helicobacter pylori
MRKVITMNGYLRVKTSYFLALNALTFLSFNSLVGAKEQHHTLQKVTTTEQKFNPSAPLSWQSEEMRNSTSSRTVISNKELKKTGNLNIENALQNVPGIQIRDATGTGVLPKISVRGFGGGGNGHSNTNMILVNGIPIYGAPYSNIELAIFPVTFQSVDRIDVIKGGTSVQYGPNTFGGVVNIITKEIPKEWENQAAERITFWGRSSNGNFVDPKEKGKPLAQTLGNQMLFNTYGRTAGMLGKHVGISAQGNWINGQGFRQNSPTKVQNYLLDAVYKINATNTFKAYYQYYQYNSYHPGTLSAQDYAYNRFINERPDNQDGGRAKRFGIVYQNYFGDPDRKVGGDFKFTYFTHDMSRDFGFSNQYQSVYMSSQNKILPFKGKGKISATNPNCGLYSYSDTNSPCWQFFDNIRRSVVNAFEPKLNLIVNTGKVKQTFNMGMRFLTEDLYRRSTTRKNPSMPNNGSGFDAGTSLNNFNNYTAVYASDEINFNNGMLTITPGLRYTFLNYEKKDAPPFKAGQTGKTIKDRYNQWNPAVNVGYKPIKELLFYFNYQRSYIPPQFSNIGSFVGTSTDYFQIFNVMEGGSRYYFNNQVSFNANYFVIFANNYFTGRYGDNKEPVNARSQGVELELYYTPIRGLNFHAAYTFIDANITSHTMVTNPANPKGPKKDIFGKKLPFVSPHQFILDASYTYAKTTIGLSSFFYSRTYSDVLNTVPFIQYAPTIKNGAITTKTAGMTPWYWVWNLQISTTFWERKKQSVNASLQINNIFNMKYWFSGIGTSLTGKKPRLLGASQRM

SEQ ID NO: 363 - DNA, 406 bp, Helicobacter pylori
  CDS (51)...(353)
tcgtcttttgtcggttcaaaaaaatctctcgacttaaaaaaacctattaaatcaagataatctatcaaatcatcaagttttttcgttctaagaattttattttgttttttagaatagcaacgataaagttcttcttttatctcatttgggaatttttgaatgttatagacaatttcactatctctttgattttgtttatattttttagccccataccaaagaaatatttgataaaaaataagaaaaatagcgtaaaagaaaaagaaaataaagaaaaaagaaagagaaaaagaaaggattttgttttgggtgtattggaaaatagactcaaaaatcaattgaaaaaccccttttagattaaaaataaaaacaataagcgaaacgacaaaagcaagcagaaaagaag

SEQ ID NO: 364 - protein, 101 aa, Helicobacter pylori
IKIIYQIIKFFRSKNFILFFRIATIKFFFYLIWEFLNVIDNFTISLILFIFFSPIPKKYLIKNKKNSVKEKENKEKRKRKRKDFVLGVLENRLKNQLKNPF

SEQ ID NO: 365 - DNA, 1143 bp, Helicobacter pylori
  CDS (89)...(1087)
gattttgtgaaaaatagtttcatttttactgcttgtatttccttaatggtgttataatcgctccataaatcatacaaaaaggatcgttatgttagttactcgctttaaaaaagctttaatctcttattctttaggcgcgcttcttgtttcatcgttattgggcgtggctagtgcttccaatcaagaaatccaagtcaaagattattttggggatcaagccatcaagcttcctgtttctaaaataatctacttgggtagctttgcagaagtgcctgctatgttccatacttgggatagggtcgtgggaatttcggattacgcttttaaatctgatattgttaaagctactctcaaagatcctaaacgcattaaatccatgagcagtgatcatgtggcggcgttgaatgtggagcttttaaaaaagcttggccccgatcttgtggtaacctttgtgggcaaccctaaagcggtagagcatgcgaaaaaatttggtatattatttctttctttccaagaaaaaaccattgcagaagtcatggaagatattgacgctcaagctaaagccttagaaattgatgcttctaaaaaactggccaaaatgcaagaaactttggattttattgctgagcgtttgaaaggtgtcaaaaagaaaaaaggggtggagcttttccataaggccaataagatcagcggccatcaagcccttgattcagacattttagaaaaaggaggcatagacaattttggcttgaaatatgtcaaatttgggcgtgctgacattagcgtggaaaaaatcgttaaagaaaaccctgagattatctttatttggtggataagcccactcacgcctgaagatgtgttaaacaaccccaaatttgctaccatcaaagccattaaaaacaagcaggtttataaactccccacaatggatattggcgggcctagagccccactcataagtctttttatcgctctaaaagcccaccctgaagcctttaagggcgtggatattaatgcgattgttaaagactactataaagtggtttttgatttgaatgatgcagaggttgaaccctttttatggcattaatttttaaaaaagggctgatatttttagccctttgtgtatcgcgctaggattag

SEQ ID NO: 366 - protein, 333 aa, Helicobacter pylori
MLVTRFKKALISYSLGALLVSSLLGVASASNQEIQVKDYFGDQAIKLPVSKIIYLGSFAEVPAMFHTWDRVVGISDYAFKSDIVKATLKDPKRIKSMSSDHVAALNVELLKKLGPDLVVTFVGNPKAVEHAKKFGILFLSFQEKTIAEVMEDIDAQAKALEIDASKKLAKMQETLDFIAERLKGVKKKKGVELFHKANKISGHQALDSDILEKGGIDNFGLKYVKFGRADISVEKIVKENPEIIFIWWISPLTPEDVLNNPKFATIKAIKNKQVYKLPTMDIGGPRAPLISLFIALKAHPEAFKGVDINAIVKDYYKVVFDLNDAEVEPFLWH

SEQ ID NO: 367 - DNA, 898 bp, Helicobacter pylori
  CDS (51)...(845)
ggggggttatagtaaaaacatgcaagtaatttaaagttaatttaagataattaggcacaatagccacaaaaagtttaaggctgtatttgaaaactctatttagtatttatctctttttatcgttgaacccactctttttagaagctaatgaaatcacttggtctaaattcttggaaaattttaaaaacaagaatgatgatgacaaacctaaacccctaactattgataaaaacaatgaaaaacagcaaatcttagacaaaaaccagcaaatcttaaaaagggctttggaaaaaagccttaaattctttttcatttttggatacaactattcgcaagccactttttcaacttctaaccaaaccttgacttttgtagccaatagcatagggtttaacaccgctaccggtttagagcattttttaagaaaccaccctaaagtcggttttagaatctttagcgtctataactatttccattctgtttccctctcccagcctcaaaccttaatggtgcaaaattatgggggcgcgttagatttttcttggatttttgtagataaaaatatttatcgctttaggagttatttagggatcgctttagaacaaggggtgttgttagtggatacgattaaaccaggtgctatcacaacgattatcccaagaaccaaaaaaaccttttttcaagcccctttgcgttttggttttatcgtggattttatcggctatttgtctttgcaattagggattgaaatgcctttagtgaggaatgttttttacacctacaacaaccatcaagaaagattcaaaccacgatttaacgctaatctttctttaatcgtttcgttttagccccccttttccccttttaaataagcccatgattttcctagggtatttta

SEQ ID NO: 368 - protein, 265 aa, Helicobacter pylori
LGTIATKSLRLYLKTLFSIYLFLSLNPLFLEANEITWSKFLENFKNKNDDDKPKPLTIDKNNEKQQILDKNQQILKRALEKSLKFFFIFGYNYSQATFSTSNQTLTFVANSIGFNTATGLEHFLRNHPKVGFRIFSVYNYFHSVSLSQPQTLMVQNYGGALDFSWIFVDKNIYRFRSYLGIALEQGVLLVDTIKPGAITTIIPRTKKTFFQAPLRFGFIVDFIGYLSLQLGIEMPLVRNVFYTYNNHQERFKPRFNANLSLIVSF

SEQ ID NO: 369 - DNA, 742 bp, Helicobacter pylori
  CDS (51)...(689)
gcacttcacgcattccataaacgatattgattatttgctagacagcttgaaaaaagcagttaaaaaattgcgttaagctaaaactatttttaaggaaaaatttggatattttagatttgaacaaagcgcaagcggtgcaacaaaatgaacaagaggtagaggataaagagcgagagtctaaagagccggtggttttagaagatttgagcgctttagcgtggcttgaattagaagagtttagccgcctttcagggcttcctaaagaaaggattttggaattagtgaatcttggtaaaatcaagagcaaaataagcagcaacaagcttttaattgatgcgagcagcgggacaaacgctttaatcaaaaaggtagaaaatagtttgatttctatggatatgaacgggcgttctttagaacctgtgtttgtggaaaagaccattaacacgattttaaacttgcatgataaggtcattggcgctaaagatgaaacgatttcagcctttaaaaatgaaaacatgtttttaaaagacgctttaatctctatgcaagaagtctatgaagaagataaaaaaaccattgatcttttgcgcgatgaactcaatcaagcgagagaagaaattgaatttatgaagaggaaataccgcttgatgtgggggaaagtcgctgacatgagcagcgtgaataaaaagtagttttaaattaacgcccatgctgagggcttattagcggtaattttaggtga

SEQ ID NO: 370 - protein, 213 aa, Helicobacter pylori
KKQLKNCVKLKLFLRKNLDILDLNKAQAVQQNEQEVEDKERESKEPVVLEDLSALAWLELEEFSRLSGLPKERILELVNLGKIKSKISSNKLLIDASSGTNALIKKVENSLISMDMNGRSLEPVFVEKTINTILNLHDKVIGAKDETISAFKNENMFLKDALISMQEVYEEDKKTIDLLRDELNQAREEIEFMKRKYRLMWGKVADMSSVNKK

What is claimed is:

1. An isolated polynucleotide that encodes:
(i) a polypeptide comprising an amino acid sequence that is homologous to the amino acid sequence of a Helicobacter polypeptide, wherein said amino acid sequence of said Helicobacter polypeptide is selected from the group consisting of GHPO 35 (SEQ ID NO:2), GHPO 55 (SEQ ID NO:4), GHPO 78 (SEQ ID NO:6), GHPO 89 (SEQ ID NO:8), GHPO 129 (SEQ ID NO:10), GHPO 541 (SEQ ID NO:12), GHPO 607 (SEQ ID NO:14), GHPO 635 (SEQ ID NO:16), GHPO 701 (SEQ ID NO:18), GHPO 712 (SEQ ID NO:20), GHPO 761 (SEQ ID NO:22), GHPO 838 (SEQ ID NO:24), GHPO 1034 (SEQ ID NO:26), GHPO 1085 (SEQ ID NO:28), GHPO 1213 (SEQ ID NO:30), GHPO 1255 (SEQ ID NO:32), GHPO 1308 (SEQ ID NO:34), GHPO 1389 (SEQ ID NO:36), GHPO 1706 (SEQ ID NO:38), GHPO 234 (SEQ ID NO:40), GHPO 314 (SEQ ID NO:42), GHPO 510 (SEQ ID NO:44), GHPO 603 (SEQ ID NO:46), GHPO 937 (SEQ ID NO:48), GHPO 1027 (SEQ ID NO:50), GHPO 1099 (SEQ ID NO:52), GHPO 1151 (SEQ ID NO:54), GHPO 1275 (SEQ ID NO:56), GHPO 1365 (SEQ ID NO:58), GHPO 1578 (SEQ ID NO:60), GHPO 22 (SEQ ID NO:62), GHPO 58 (SEQ ID NO:64), GHPO 200 (SEQ ID NO:66), GHPO 558 (SEQ ID NO:68), GHPO 563 (SEQ ID NO:70), GHPO 695 (SEQ ID NO:72), GHPO 699 (SEQ ID NO:74), GHPO 702 (SEQ ID NO:76), GHPO 709 (SEQ ID NO:78), GHPO 741 (SEQ ID NO:80), GHPO 762 (SEQ ID NO:82), GHPO 827 (SEQ ID NO:84), GHPO 852 (SEQ ID NO:86), GHPO 1013 (SEQ ID NO:88), GHPO 1020 (SEQ ID NO:90), GHPO 1031 (SEQ ID NO:92), GHPO 1052 (SEQ ID NO:94), GHPO 1127 (SEQ ID NO:96), GHPO 1149 (SEQ ID NO:98), GHPO 1176 (SEQ ID NO:100), GHPO 1250 (SEQ ID NO:102), GHPO 1312 (SEQ ID NO:104), GHPO 1358 (SEQ ID NO:106), GHPO 1490 (SEQ ID NO:108), GHPO 1559 (SEQ ID NO:110), GHPO 1651 (SEQ ID NO:112), GHPO 1726 (SEQ ID NO:114), GHPO 1780 (SEQ ID NO:116), GHPO 895 (SEQ ID NO:118), GHPO 1447 (SEQ ID NO:120), GHPO 28 (SEQ ID NO:122), GHPO 86 (SEQ ID NO:124), GHP0155 (SEQ ID NO:126), GHPO 157 (SEQ ID NO:128), GHPO 237 (SEQ ID NO:130), GHPO 290 (SEQ ID NO:132), GHPO 293 (SEQ ID NO:134), GHPO 335 (SEQ ID NO:136), GHPO 374 (SEQ ID NO:138), GHPO 442 (SEQ ID NO:140), GHPO 480 (SEQ ID NO:142), GHPO 523 (SEQ ID NO:144), GHPO 610 (SEQ ID NO:146), GHPO 675 (SEQ ID NO:148), GHPO 690 (SEQ ID NO:150), GHPO 829 (SEQ ID NO:152), GHPO 850 (SEQ ID NO:154), GHPO 876 (SEQ ID NO:156), GHPO 984 (SEQ ID NO:158), GHPO 989 (SEQ ID NO:160), GHPO 1111 (SEQ ID NO:162), GHPO 1145 (SEQ ID NO:164), GHPO 1256 (SEQ ID NO:166), GHPO 1264 (SEQ ID NO:168), GHPO 1316 (SEQ ID NO:170), GHPO 1368 (SEQ ID NO:172), GHPO 1442 (SEQ ID NO:174), GHPO 1506 (SEQ ID NO:176), GHPO 1543 (SEQ ID NO:178), GHPO 1574 (SEQ ID NO:180), GHPO 1627 (SEQ ID NO:182), GHPO 1657 (SEQ ID NO:184), GHPO 1664 (SEQ ID NO:186), GHPO 1694 (SEQ ID NO:188), GHPO 1704 (SEQ ID NO:190), GHPO 1763 (SEQ ID NO:192), GHPO 616 (SEQ ID NO:194), GHPO 76 (SEQ ID NO:196), GHPO 109 (SEQ ID NO:198), GHPO 163 (SEQ ID NO:200), GHPO 169 (SEQ ID NO:202), GHPO 208 (SEQ ID NO:204), GHPO 219 (SEQ ID NO:206), GHPO 445 (SEQ ID NO:208), GHPO 479 (SEQ ID NO:210), GHPO 525 (SEQ ID NO:212), GHPO 535 (SEQ ID NO:214), GHPO 731 (SEQ ID NO:216), GHPO 836 (SEQ ID NO:218), GHPO 879 (SEQ ID NO:220), GHPO 881 (SEQ ID NO:222), GHPO 886 (SEQ ID NO:224), GHPO 893 (SEQ ID NO:226), GHPO 894 (SEQ ID NO:228), GHPO 976 (SEQ ID NO:230), GHPO 1011 (SEQ ID NO:232), GHPO 1024 (SEQ ID NO:234), GHPO 1084 (SEQ ID NO:236), GHPO 1329 (SEQ ID NO:238), GHPO 1330 (SEQ ID NO:240), GHPO 1346 (SEQ ID NO:242), GHPO 1360 (SEQ ID NO:244), GHPO 1388 (SEQ ID NO:246), GHPO 1411 (SEQ ID NO:248), GHPO 1419 (SEQ ID NO:250), GHPO 1446 (SEQ ID NO:252), GHPO 1469 (SEQ ID NO:254), GHPO 1501 (SEQ ID NO:256), GHPO 1505 (SEQ ID NO:258), GHPO 1522 (SEQ ID NO:260), GHPO 1525 (SEQ ID NO:262), GHPO 1615 (SEQ ID NO:264), GHPO 1689 (SEQ ID NO:266), GHPO 1733 (SEQ ID NO:268), GHPO 18 (SEQ ID NO:270), GHPO 139 (SEQ ID NO:272), GHPO 142 (SEQ ID NO:274), GHPO 250 (SEQ ID NO:276), GHPO 257 (SEQ ID NO:278), GHPO 325 (SEQ ID NO:280), GHPO 355 (SEQ ID NO:282), GHPO 357 (SEQ ID NO:284), GHPO 454 (SEQ ID NO:286), GHPO 475 (SEQ ID NO:288), GHPO 515 (SEQ ID NO:290), GHPO 527 (SEQ ID NO:292), GHPO 551 (SEQ ID NO:294), GHPO 602 (SEQ ID NO:296), GHPO 626 (SEQ ID NO:298), GHPO 646 (SEQ ID NO:300), GHPO 653 (SEQ ID NO:302), GHPO 655 (SEQ ID NO:304), GHPO 670 (SEQ ID NO:306), GHPO 739 (SEQ ID NO:308), GHPO 798 (SEQ ID NO:310), GHPO 1102 (SEQ ID NO:312), GHPO 1114 (SEQ ID NO:314), GHPO 1152 (SEQ ID NO:316), GHPO 1272 (SEQ ID NO:318), GHPO 1345 (SEQ ID NO:320), GHPO 1377 (SEQ ID NO:322), GHPO 1424 (SEQ ID NO:324), GHPO 1430 (SEQ ID NO:326), GHPO 1502 (SEQ ID NO:328), GHPO 1600 (SEQ ID NO:330), GHPO 1714 (SEQ ID NO:332), GHPO 359 (SEQ ID NO:334), GHPO 678 (SEQ ID NO:336), GHPO 708 (SEQ ID NO:338), GHPO 759 (SEQ ID NO:340), GHPO 847 (SEQ ID NO:342), GHPO 1050 (SEQ ID NO:344), GHPO 1101 (SEQ ID NO:346), GHPO 1120 (SEQ ID NO:348), GHPO 1138 (SEQ ID NO:350), GHPO 1310 (SEQ ID NO:352), GHPO 1320 (SEQ ID NO:354), GHPO 1375 (SEQ ID NO:356), GHPO 1432 (SEQ ID NO:358), GHPO 21 (SEQ ID NO:360), GHPO 282 (SEQ ID NO:362), GHPO 1089 (SEQ ID NO:364), GHPO 1141 (SEQ ID NO:366), GHPO 1280 (SEQ ID NO:368), and GHPO 1608 (SEQ ID NO:370); or
(ii) a derivative of said polypeptide encoded by said polynucleotide.

2. The isolated polynucleotide of claim 1, which encodes a mature form of said polypeptide.

3. The isolated polynucleotide of claim 1, wherein the polynucleotide is a DNA molecule.

4. The isolated polynucleotide of claim 1, which is a DNA molecule that can be amplified and/or cloned by polymerase chain reaction from a Helicobacter genome, using either a 5′ oligonucleotide primer and a 3′ oligonucleotide primer having sequences as shown in the table.

5. The isolated DNA molecule of claim 4, which can be amplified or cloned by the polymerase chain reaction from a Helicobacter pylori genome.

6. The isolated polynucleotide of claim 1, which is a DNA molecule that encodes the mature form or a derivative of a polypeptide encoded by the DNA molecule of claim 4.

7. The isolated polynucleotide of claim 1, which is a DNA molecule that encodes the mature form or a derivative of a polypeptide encoded by the DNA molecule of claim 5.

8. A compound, in a substantially purified form, that is the mature form or a derivative of a polypeptide comprising an amino acid sequence that is homologous to a Helicobacter amino acid sequence that is selected from the group consisting of GHPO 35 (SEQ ID NO:2), GHPO 55 (SEQ ID NO:4), GHPO 78 (SEQ ID NO:6), GHPO 89 (SEQ ID NO:8), GPO 129 (SEQ ID NO:10), GHPO 541 (SEQ ID NO:12), GHPO 607 (SEQ ID NO:14), GHPO 635 (SEQ ID NO:16), GHPO 701 (SEQ ID NO:18), GHPO 712 (SEQ ID NO:20), GHPO 761 (SEQ ID NO:22), GHPO 838 (SEQ ID NO:24), GHPO 1034 (SEQ ID NO:26), GHPO 1085 (SEQ ID NO:28), GHPO 1213 (SEQ ID NO:30), GHPO 1255 (SEQ ID NO:32), GHPO 1308 (SEQ ID NO:34), GHPO 1389 (SEQ ID NO:36), GHPO 1706 (SEQ ID NO:38), GHPO 234 (SEQ ID NO:40), GHPO 314 (SEQ ID NO:42), GHPO 510 (SEQ ID NO:44), GHPO 603 (SEQ ID NO:46), GHPO 937 (SEQ ID NO:48), GHPO 1027 (SEQ ID NO:50), GHPO 1099 (SEQ ID NO:52), GHPO 1151 (SEQ ID NO:54), GHPO 1275 (SEQ ID NO:56), GHPO 1365 (SEQ ID NO:58), GHPO 1578 (SEQ ID NO:60), GHPO 22 (SEQ ID NO:62), GHPO 58 (SEQ ID NO:64), GHPO 200 (SEQ ID NO:66), GHPO 558 (SEQ ID NO:68), GHPO 563 (SEQ ID NO:70), GHPO 695 (SEQ ID NO:72), GHPO 699 (SEQ ID NO:74), GHPO 702 (SEQ ID NO:76), GHPO 709 (SEQ ID NO:78), GHPO 741 (SEQ ID NO:80), GHPO 762 (SEQ ID NO:82), GHPO 827 (SEQ ID NO:84), GHPO 852 (SEQ ID NO:86), GHPO 1013 (SEQ ID NO:88), GHPO 1020 (SEQ ID NO:90), GHPO 1031 (SEQ ID NO:92), GHPO 1052 (SEQ ID NO:94), GHPO 1127 (SEQ ID NO:96), GHPO 1149 (SEQ ID NO:98), GHPO 1176 (SEQ ID NO:100), GHPO 1250 (SEQ ID NO:102), GHPO 1312 (SEQ ID NO:104), GHPO 1358 (SEQ ID NO:106), GHPO 1490 (SEQ ID NO:108), GHPO 1559 (SEQ ID NO:110), GHPO 1651 (SEQ ID NO:112), GHPO 1726 (SEQ ID NO:114), GHPO 1780 (SEQ ID NO:116), GHPO 895 (SEQ ID NO:118), GHPO 1447 (SEQ ID NO:120), GHPO 28 (SEQ ID NO:122), GHPO 86 (SEQ ID NO:124), GHPO 155 (SEQ ID NO:126), GHPO 157 (SEQ ID NO:128), GHPO 237 (SEQ ID NO:130), GHPO 290 (SEQ ID NO:132), GHPO 293 (SEQ ID NO:134), GHPO 335 (SEQ ID NO:136), GHPO 374 (SEQ ID NO:138), GHPO 442 (SEQ ID NO:140), GHPO 480 (SEQ ID NO:142), GHPO 523 (SEQ ID NO:144), GHPO 610 (SEQ ID NO:146), GHPO 675 (SEQ ID NO:148), GHPO 690 (SEQ ID NO:150), GHPO 829 (SEQ ID NO:152), GHPO 850 (SEQ ID NO:154), GHPO 876 (SEQ ID NO:156), GHPO 984 (SEQ ID NO:158), GHPO 989 (SEQ ID NO:160), GHPO 1111 (SEQ ID NO:162), GHPO 1145 (SEQ ID NO:164), GHPO 1256 (SEQ ID NO:166), GHPO 1264 (SEQ ID NO:168), GHPO 1316 (SEQ ID NO:170), GHPO 1368 (SEQ ID NO:172), GHPO 1442 (SEQ ID NO:174), GHPO 1506 (SEQ ID NO:176), GHPO 1543 (SEQ ID NO:178), GHPO 1574 (SEQ ID NO:180), GHPO 1627 (SEQ ID NO:182), GHPO 1657 (SEQ ID NO:184), GHPO 1664 (SEQ ID NO:186), GHPO 1694 (SEQ ID NO:188), GHPO 1704 (SEQ ID NO:190), GHPO 1763 (SEQ ID NO:192), GHPO 616 (SEQ ID NO:194), GHPO 76 (SEQ ID NO:196), GHPO 109 (SEQ ID NO:198), GHPO 163 (SEQ ID NO:200), GHPO 169 (SEQ ID NO:202), GHPO 208 (SEQ ID NO:204), GHPO 219 (SEQ ID NO:206), GHPO 445 (SEQ ID NO:208), GHPO 479 (SEQ ID NO:210), GHPO 525 (SEQ ID NO:212), GHPO 535 (SEQ ID NO:214), GHPO 731 (SEQ ID NO:216), GHPO 836 (SEQ ID NO:218), GHPO 879 (SEQ ID NO:220), GHPO 881 (SEQ ID NO:222), GHPO 886 (SEQ ID NO:224), GHPO 893 (SEQ ID NO:226), GHPO 894 (SEQ ID NO:228), GHPO 976 (SEQ ID NO:230), GHPO 1011 (SEQ ID NO:232), GHPO 1024 (SEQ ID NO:234), GHPO 1084 (SEQ ID NO:236), GHPO 1329 (SEQ ID NO:238), GHPO 1330 (SEQ ID NO:240), GHPO 1346 (SEQ ID NO:242), GHPO 1360 (SEQ ID NO:244), GHPO 1388 (SEQ ID NO:246), GHPO 1411 (SEQ ID NO:248), GHPO 1419 (SEQ ID NO:250), GHPO 1446 (SEQ ID NO:252), GHPO 1469 (SEQ ID NO:254), GHPO 1501 (SEQ ID NO:256), GHPO 1505 (SEQ ID NO:258), GHPO 1522 (SEQ ID NO:260), GHPO 1525 (SEQ ID NO:262), GHPO 1615 (SEQ ID NO:264), GHPO 1689 (SEQ ID NO:266), GHPO 1733 (SEQ ID NO:268), GHPO 18 (SEQ ID NO:270), GHPO 139 (SEQ ID NO:272), GHPO 142 (SEQ ID NO:274), GHPO 250 (SEQ ID NO:276), GHPO 257 (SEQ ID NO:278), GHPO 325 (SEQ ID NO:280), GHPO 355 (SEQ ID NO:282), GHPO 357 (SEQ ID NO:284), GHPO 454 (SEQ ID NO:286), GHPO 475 (SEQ ID NO:288), GHPO 515 (SEQ ID NO:290), GHPO 527 (SEQ ID NO:292), GHPO 551 (SEQ ID NO:294), GHPO 602 (SEQ ID NO:296), GHPO 626 (SEQ ID NO:298), GHPO 646 (SEQ ID NO:300), GHPO 653 (SEQ ID NO:302), GHPO 655 (SEQ ID NO:304), GHPO 670 (SEQ ID NO:306), GHPO 739 (SEQ ID NO:308), GHPO 798 (SEQ ID NO:310), GHPO 1102 (SEQ ID NO:312), GHPO 1114 (SEQ ID NO:314), GHPO 1152 (SEQ ID NO:316), GHPO 1272 (SEQ ID NO:318), GHPO 1345 (SEQ ID NO:320), GHPO 1377 (SEQ ID NO:322), GHPO 1424 (SEQ ID NO:324), GHPO 1430 (SEQ ID NO:326), GHPO 1502 (SEQ ID NO:328), GHPO 1600 (SEQ ID NO:330), GHPO 1714 (SEQ ID NO:332), GHPO 359 (SEQ ID NO:334), GHPO 678 (SEQ ID NO:336), GHPO 708 (SEQ ID NO:338), GHPO 759 (SEQ ID NO:340), GHPO 847 (SEQ ID NO:342), GHPO 1050 (SEQ ID NO:344), GHPO 1101 (SEQ ID NO:346), GHPO 1120 (SEQ ID NO:348), GHPO 1138 (SEQ ID NO:350), GHPO 1310 (SEQ ID NO:352), GHPO 1320 (SEQ ID NO:354), GHPO 1375 (SEQ ID NO:356), GHPO 1432 (SEQ ID NO:358), GHPO 21 (SEQ ID NO:360), GHPO 282 (SEQ ID NO:362), GHPO 1089 (SEQ ID NO:364), GHPO 1141 (SEQ ID NO:366), GHPO 1280 (SEQ ID NO:368), and GHPO 1608 (SEQ ID NO:370); or
(ii) a derivative of said polypeptide.

9. The compound of claim 8, which is the mature form or a derivative of a polypeptide encoded by a DNA molecule of claim 4.

10. The compound of claim 8, which is the mature form or a derivative of a polypeptide encoded by a DNA molecule of claim 5.

11. A method of preventing or treating Helicobacter infection in a mammal, said method comprising administering to said mammal a prophylactically or therapeutically effective amount of a compound of claim 8.

12. The method of claim 11, further comprising administering an antibiotic, an antisecretory agent, a bismuth salt, or a combination thereof.

13. The method of claim 12, wherein said antibiotic is selected from the group consisting of amoxicillin, clarithromycin, tetracycline, metronidizole, and erythromycin.

14. The method of claim 12, wherein said bismuth salt is selected from the group consisting of bismuth subcitrate and bismuth subsalicylate.

15. The method of claim 12, wherein said antisecretory agent is a proton pump inhibitor.

16. The method of claim 15, wherein said proton pump inhibitor is selected from the group consisting of omeprazole, lansoprazole, and pantoprazole.

17. The method of claim 12, wherein said antisecretory agent is an H₂-receptor antagonist.

18. The method of claim 17, wherein said H₂-receptor antagonist is selected from the group consisting of ranitidine, cimetidine, famotidine, nizatidine, and roxatidine.

19. The method of claim 12, wherein said antisecretory agent is a prostaglandin analog.

20. The method of claim 19, wherein said prostaglandin analog is misoprostil or enprostil.

21. The method of claim 11, which further comprises administering a prophylactically or therapeutically effective amount of a second Helicobacter polypeptide or a derivative thereof.

22. The method of claim 21, wherein the second Helicobacter polypeptide is a Helicobacter urease, a subunit, or a derivative thereof.

23. A composition comprising a compound of claim 8, together with a physiologically acceptable diluent or carrier.

24. The composition of claim 23, further comprising an adjuvant.

25. The composition of claim 23, further comprising a second Helicobacter polypeptide or a derivative thereof.

26. The composition of claim 25, wherein said second Helicobacter polypeptide is a Helicobacter urease, or a subunit or a derivative thereof.

27. A method of preventing or treating Helicobacter infection in a mammal, said method comprising administering to said mammal a prophylactically or therapeutically effective amount of a polynucleotide of claim 1.

28. A method of preventing or treating Helicobacter infection in a mammal, said method comprising administering to said mammal a prophylactically or therapeutically effective amount of a polynucleotide of claim 4.

29. A method of preventing or treating Helicobacter infection in a mammal, said method comprising administering to said mammal a prophylactically or therapeutically effective amount of a polynucleotide of claim 7.

30. A composition comprising a viral vector, in the genome of which is inserted a DNA molecule of claim 3, said DNA molecule being placed under conditions for expression in a mammalian cell and said viral vector being admixed with a physiologically acceptable diluent or carrier.

31. The composition of claim 30, wherein said viral vector is a poxyirus.

32. A composition that comprises a bacterial vector comprising a DNA molecule of claim 3, said DNA molecule being placed under conditions for expression and said bacterial vector being admixed with a physiologically acceptable diluent or carrier.

33. The composition of claim 32, wherein said vector is selected from the group consisting of Shigella, Salmonella, Vibrio cholerae, Lactobacillus, Bacille bilié de Calmette-Guérin, and Streptococcus.

34. A composition comprising a polynucleotide of claim 1, together with a physiologically acceptable diluent or carrier.

35. The composition of claim 34, wherein said polynucleotide is a DNA molecule that is inserted in a plasmid that is unable to replicate and to substantially integrate in a mammalian genome and is placed under conditions for expression in a mammalian cell.

36. An expression cassette comprising a DNA molecule of claim 3, said DNA molecule being placed under conditions for expression in a procaryotic or eucaryotic cell.

37. A process for producing a compound of claim 8, which comprises culturing a procaryotic or eucaryotic cell transformed or transfected with an expression cassette of claim 36, and recovering said compound from the cell culture.

38. A method of preventing or treating Helicobacter infection in a mammal, said method comprising administering to said mammal a prophylactically or therapeutically effective amount of an antibody that binds to the compound of claim 8.
